United States Patent Application Publication US 2024/0117295 A1 - sequence listing, part 11

SEQ ID NO: 8 - DNA, 3977505 bp, Artificial Sequence (residues 1-1,988,753 of 3,977,505)
  Synthetic E.coli genome
agcttttcattctgactgcaacgggcaatatgtctctgtgtggattaaaaaaagagtgtctgatagcagcttctgaactggttacctgccgtgagtaaattaaaattttattgacttaggtcactaaatactttaaccaatataggcatagcgcacagacagataaaaattacagagtacacaacatccatgaaacgcattagcaccaccattaccaccaccatcaccattaccacaggtaacggtgcgggctgacgcgtacaggaaacacagaaaaaagcccgcacctgacagtgcgggcttttttttttcgaccaaaggtaacgaggtaacaaccatgcgagtgttgaagttcggcggtacaagtgtggcaaatgcagaacgttttctgcgtgttgccgatattctggaaagcaatgccaggcaggggcaggtggccaccgtcctctctgcccccgccaaaatcaccaaccacctggtggcgatgattgaaaaaaccattagcggccaggatgctttacccaatatcagcgatgccgaacgtatttttgccgaacttttgacgggactcgccgccgcccagccggggttcccgctggcgcaattgaaaactttcgtcgatcaggaatttgcccaaataaaacatgtcctgcatggcattagtttgttggggcagtgcccggatagcatcaacgctgcgctgatttgccgtggcgagaaaatgagcatcgccattatggccggcgtattagaagcgcgcggtcacaacgttactgttatcgatccggtcgaaaaactgctggcagtggggcattacctcgaatctaccgtcgatattgctgagtccacccgccgtattgcggcaagccgcattccggctgatcacatggtgctgatggcaggtttcaccgccggtaatgaaaaaggcgaactggtggtgcttggacgcaacggttccgactactctgctgcggtgctggctgcctgtttacgcgccgattgttgcgagatttggacggacgttgacggggtctatacctgcgacccgcgtcaggtgcccgatgcgaggttgttgaagagcatgtcctaccaggaagcgatggagctttcctacttcggcgctaaagttcttcacccccgcaccattacccccatcgcccagttccagatcccttgcctgattaaaaataccggaaatcctcaagcaccaggtacgctcattggtgccagccgtgatgaagacgaattaccggtcaagggcatttccaatctgaataacatggcaatgttcagcgtttctggtccggggatgaaagggatggtcggcatggcggcgcgcgtctttgcagcgatgagtcgcgcccgtatttccgtggtgctgattacgcaaagttcttccgaatacagcatcagtttctgcgttccacaaagcgactgtgtgcgagctgaacgggcaatgcaggaagagttctacctggaactgaaagaaggcttactggagccgctggcagtgacggaacggctggccattatcagcgtggtaggtgatggtatgcgcaccttgcgtgggatcagcgcgaaattctttgccgcactggcccgcgccaatatcaacattgtcgccattgctcagggatcttctgaacgcagtatctctgtcgtggtaaataacgatgatgcgaccactggcgtgcgcgttactcatcagatgctgttcaataccgatcaggttatcgaagtgtttgtgattggcgtcggtggcgttggcggtgcgctgctggagcaactgaagcgtcagcaaagctggctgaagaataaacatatcgacttacgtgtctgcggtgttgccaacagcaaggctctgctcaccaatgtacatggccttaatctggaaaactggcaggaagaactggcgcaagccaaagagccgtttaatctcgggcgcttaattcgcctcgtgaaagaatatcatctgctgaacccggtcattgttgactgcacttccagccaggcagtggcggatcaatatgccgacttcctgcgcgaaggtttccacgttgtcacgccgaacaaaaaggccaacaccagcagcatggattactaccatcagttgcgttatgcggcggaaaaaagccggcgtaaattcctctatgacaccaacgttggggctggattaccggttattgagaacctgcaaaatctgctcaatgcaggtgatgaattgatgaagttctccggcattctttctggtagcctttcttatatcttcggcaagttagacgaaggcatgagtttctccgaggcgaccacgctggcgcgggaaatgggttataccgaaccggacccgcgagatgatctttctggtatggatgtggcgcgtaaactattgattctcgctcgtgaaacgggacgtgaactggagctggcggatattgaaattgaacctgtgctgcccgcagagtttaacgccgagggtgatgttgccgcttttatggcgaatctgagtcaactcgacgatctctttgccgcgcgcgtggcgaaggcccgtgatgaaggaaaagttttgcgctatgttggcaatattgatgaagatggcgtctgccgcgtgaagattgccgaagtggatggtaatgatccgctgttcaaagtgaaaaatggcgaaaacgccctggccttctatagccactattatcagccgctgccgttggtactgcgcggatatggtgcgggcaatgacgttacagctgccggtgtctttgctgatctgctacgtaccctcagttggaagttaggagtctgacatggttaaagtttatgccccggcttccagtgccaatatgagcgtcgggtttgatgtgctcggggcggcggtgacacctgttgatggtgcattgctcggagatgtagtcacggttgaggcggcagagacattcagtctcaacaacctcggacgctttgccgataagctgccgagtgaaccacgggaaaatatcgtttatcagtgctgggagcgtttttgccaggaactgggtaagcaaattccagtggcgatgaccctggaaaagaatatgccgatcggtagcggcttaggctccagtgcctgtagcgtggtcgcggcgctgatggcgatgaatgaacactgcggcaagccgcttaatgacactcgtttgctggctttgatgggcgagctggaaggccgtatctccggcagcattcattacgacaacgtggcaccgtgttttctcggtggtatgcagttgatgatcgaagaaaacgacatcatcagccagcaagtgccagggtttgatgagtggctgtgggtgctggcgtatccggggattaaagtcagcacggcagaagccagggctattttaccggcgcagtatcgccgccaggattgcattgcgcacgggcgacatctggcaggcttcattcacgcctgctattcccgtcagcctgagcttgccgcgaagctgatgaaagatgttatcgctgaaccctaccgtgaacggttactgccaggcttccggcaggcgcggcaggcggtcgcggaaatcggcgcggtagcgagcggtatctccggctccggcccgaccttgttcgctctgtgtgacaagccggaaaccgcccagcgcgttgccgactggttgggtaagaactacctgcaaaatcaggaaggttttgttcatatttgccggctggatacggcgggcgcacgagtactggaaaactaaatgaaactctacaatctgaaagatcacaacgagcaggtcagctttgcgcaagccgtaacccaggggttgggcaaaaatcaggggctgttttttccgcacgacctgccggaattcagcctgactgaaattgatgagatgctgaagctggattttgtcacccgcagtgcgaagatcctcagcgcgtttattggtgatgaaatcccacaggaaatcctggaagagcgcgtgcgcgcggcgtttgccttcccggctccggtcgccaatgttgaaagcgatgtcggttgtctggaattgttccacgggccaacgctggcatttaaagatttcggcggtcgctttatggcacaaatgctgacccatattgcgggtgataagccagtgaccattctgaccgcgacctccggtgataccggagcggcagtggctcatgctttctacggtttaccgaatgtgaaagtggttatcctctatccacgaggcaaaatcagtccactgcaagaaaaactgttctgtacattgggcggcaatatcgaaactgttgccatcgacggcgatttcgatgcctgtcaggcgctggtgaagcaggcgtttgatgatgaagaactgaaagtggcgctagggttaaacagcgctaacagcattaacatcagccgtttgctggcgcagatttgctactactttgaagctgttgcgcagctgccgcaggagacgcgcaaccagctggttgtcagcgtgccaagcggaaacttcggcgatttgacggcgggtctgctggcgaagagtctcggtctgccggtgaaacgttttattgctgcgaccaacgtgaacgataccgtgccacgtttcctgcacgacggtcagtggagtcccaaagcgactcaggcgacgttatccaacgcgatggacgtgagtcagccgaacaactggccgcgtgtggaagagttgttccgccgcaaaatctggcaactgaaagagctgggttatgcagccgtggatgatgaaaccacgcaacagacaatgcgtgagctaaaagaactgggctacactagcgagccgcacgctgccgtagcttatcgtgcgctgcgtgatcagttgaatccaggcgaatatggcttgttcctcggcaccgcgcatccggcgaaatttaaagagagcgtggaagcgattctcggtgaaacgttggatctgccaaaagagctggcagaacgtgctgatttacccttgcttagtcataatctgcccgccgattttgctgcgttgcgtaaattgatgatgaatcatcagtaaaatctattcattatctcaatcaggccgggtttgcttttatgcagcccggcttttttatgaagaaattatggagaaaaatgacagggaaaaaggagaaattctcaataaatgcggtaacttagagattaggattgcggagaataacaaccgccgttctcatcgagtaatctccggatatcgacccataacgggcaatgataaaaggagtaacctgtgaaaaagatgcaatctatcgtactcgcactttccctggttctggtcgctcccatggcagcacaggctgcggaaattacgttagtcccgagtgtaaaattacagataggcgatcgtgataatcgtggctattactgggatggaggtcactggcgcgaccacggctggtggaaacaacattatgaatggcgaggcaatcgctggcacctacacggaccgccgccaccgccgcgccaccataagaaagctcctcatgatcatcacggcggtcatggtccaggcaaacatcaccgctaaatgacaaatgccgggtaacaatccggcattcagcgcctgatgcgacgctggcgcgtcttatcaggcctacgttaattctgcaatatattgaatctgcatgcttttgtaggcaggataaggcgttcacgccgcatccggcattgactgcaaacttaacgctgctcgtagcgtttaaacaccagttcgccattgctggaggaatcttcatcaaagaagtaaccttcgctattaaaaccagtcagttgctctggtttggtcagccgattttcaataatgaaacgactcatcagaccgcgtgctttcttagcgtagaagctgatgatcttaaatttgccgttcttctcatcgaggaacaccggcttgataatctcggcattcaatttcttcggcttcacgcttttaaaatactcatcactcgccagattaatcaccacattatcgccttgtgctgcgagcgcctcgttcagcttgttggtgatgatatctccccagaattgatacagatctttccctcgggcattctcaagacggatccccatttccagacgataaggctgcattaaatcgagcgggcggagtacgccatacaagccggaaagcattcgcaaatgctgttgggcaaaatcgaaatcgtcttcgctgaaggtttcggcctgcaagccggtgtagacatcacctttaaacgccagaatcgcctggcgggcattcgccggcgtgaaatctggctgccagtcatgaaagcgagcggcgttgatacccgccagtttgtcgctgatgcgcatcagcgtgctaatctgcggaggcgtcagtttccgcgcctcatggatcaactgctgggaattgtctaacagctccggcagcgtatagcgcgtggtggtcaacgggctttggtaatcaagcgttttcgcaggactaataagaatcagcatatccagtccttgcaggaaatttatgccgactttagcaaaaaatgagaatgagttgatcgatagttgtgattactcctggctaacatcatcccacgcgtccggagaaagctggcgaccgatatccggataacgcaatggatcaaacaccgggcgcacgccgagtttacgctggcgtagataatcactggcaatggtatgaaccacagggctgagcagtaaaatggcggtcaaattggtaatagccatgcaggccattatgatatctgccagttgccacatcagcggaaggcttagcaaggtgccgccgatgaccgttgcgaaggtgcagatccgcaaacaccagatcgctttagggttgttcaggcgtaaaaagaagagattgttttcggcataaatgtagttggcaacgatggagctgaaggcaaacagaataaccacaagggtaacaaactcagcaccccaggaacccattagcacccgcatcgccttctggataagctgaataccttccagcggcatgtaggttgtgccgttacccgccagtaatatcagcatggcgcttgccgtacagatgaccagggtgtcgataaaaatgccaatcatctggacaatcccttgcgctgccggatgcggaggccaggacgccgctgccgctgccgcgtttggcgtgctacccattcccgcctcattggaaaacatactgcgctgaaaaccgttagtaatcgcctggcttaaggtatatcccgccgcgccgcctgccgcttcctgccagccaaaagcactctcaaaaatagaccaaatgacgtggggaagttgcccgatattcattacgcaaattaccaggctggtcagtacccagattatcgccatcaacgggacaaagccctgcatgagccgggcgacgccatgaagaccgcgagtgattgccagcagagtaaagacagcgagaataatgcctgtcaccagcgggggaaaatcaaaagaaaaactcagggcgcgggcaacggcgttcgcttgaactccgctgaaaattatgccataggcgatgagcaaaaagacggcgaacagaacgcccatccagcgcatccccagcccgcgcgccatataccatgccggtccgccacgaaactgcccattgacgtcacgttctttataaagttgtgccagagaacattcggcaaagctggtcgccatgccgataaacgcggcaacccacatccaaaagacggctccaggtccaccggcggtaatagccagcgcaacgccggccaggttgccgctacccacgcgcgccgcaagactggtacacaaactctgaaaactggttaaaccgcctggctgtggatgaatgctatttttaagacttttgccaaactggcggatgtagcgaaactgcacaaatccggtgcgaaaagtgaaccaacaacctgcgccgaagagcaggtaaatcattacgcttccccaaaggacgctgttaatgaaggagaaaaaatctggcatgcatatccctcttattgccggccgcgatgactttcctgtgtaaacgttaccaattgtttaagaagtatatacgctacgaggtacttgataacttctgcgtagcatacatgaggttttgtataaaaatggcgggcgatatcaacgcagtgtcagaaatccgaaacagtctcgcctggcgataaccgtcttgtcggcggttgcgctgacgttgcgtcgtgatatcatcagggcagaccggttacatccccctaacaagctgtttaaagagaaatactatcatgacggacaaattgacctcccttcgtcagtacaccaccgtagtggccgacactggggacatcgcggcaatgaagctgtatcaaccgcaggatgccacaaccaacccttctctcattcttaacgcagcgcagattccggaataccgtaagttgattgatgatgctgtcgcctgggcgaaacagcagagcaacgatcgcgcgcagcagatcgtggacgcgaccgacaaactggcagtaaatattggtctggaaatcctgaaactggttccgggccgtatcagtactgaagttgatgcgcgtctttcctatgacaccgaagcgagtattgcgaaagcaaaacgcctgatcaaactctacaacgatgctggtattagcaacgatcgtattctgatcaaactggcttctacctggcagggtatccgtgctgcagaacagctggaaaaagaaggcatcaactgtaacctgaccctgctgttctccttcgctcaggctcgtgcttgtgcggaagcgggcgtgttcctgatcagcccgtttgttggccgtattcttgactggtacaaagcgaataccgataagaaagagtacgctccggcagaagatccgggcgtggtttctgtatctgaaatctaccagtactacaaagagcacggttatgaaaccgtggttatgggcgcaagcttccgtaacatcggcgaaattctggaactggcaggctgcgaccgtctgaccatcgcaccggcactgctgaaagagctggcggagagcgaaggggctatcgaacgtaaactgtcttacaccggcgaagtgaaagcgcgtccggcgcgtatcactgagtccgagttcctgtggcagcacaaccaggatccaatggcagtagataaactggcggaaggtatccgtaagtttgctattgaccaggaaaaactggaaaaaatgatcggcgatctgctgtaatcattcttagcgtgaccgggaagtcggtcacgctacctcttctgaagcctgtctgtcactcccttcgcagtgtatcattctgtttaacgagactgtttaaacggaaaaatcttgatgaatactttacgtattggcttagtttccatctctgatcgcgcatccagcggcgtttatcaggataaaggcatccctgcgctggaagaatggctgacaagcgcgctaaccacgccgtttgaactggaaacccgcttaatccccgatgagcaggcgatcatcgagcaaacgttgtgtgagctggtggatgaaatgagttgccatctggtgctcaccacgggcggaactggcccggcgcgtcgtgacgtaacgcccgatgcgacgctggcagtagcggaccgcgagatgcctggctttggtgaacagatgcgccagatcagcctgcattttgtaccaactgcgatccttagccgtcaggtgggcgtgattcgcaaacaggcgctgatccttaacttacccggtcagccgaagtctattaaagagacgctggaaggtgtgaaggacgctgagggtaacgttgtggtacacggtatttttgccagcgtaccgtactgcattcagttgctggaagggccatacgttgaaacggcaccggaagtggttgcagcattcagaccgaagagtgcaagacgcgacgttagcgaataaaaaaatccccccgagcggggggatctcaaaacaattagtgggattcaccaatcggcagaacggtgcgaccaaactgctcgttcagtacttcacccatcgccagatagattgcgctggcaccgcagatcagcccaatccagccggcaaagtggatgattgcggcgttaccggcaatgttaccgatcgccagcagggcaaacagcacggtcaggctaaagaaaacgaattgcagaacgcgtgcgcctttcagcgtgccgaagaacataaacagcgtaaatacgccccacagacccaggtagacaccaaggaactgtgcatttggcgcatcggtcagacccagtttcggcatcagcagaatcgcaaccagcgtcagccagaaagaaccgtaagaggtgaatgcggttaaaccgaaagtgttgccttttttgtactccagcagaccagcaaaaatttgcgcgatgccgccgtagaaaatgcccatggcaagaataatgccgtccagagcgaaataacccacgttgtgcaggttaagcagaatggtggtcatgccgaagcccatcaggcccagcggtgccggattagccaacttagtgttgcccataattcctcaaaaatcatcatcgaatgaatggtgaaataatttccctgaataactgtagtgttttcagggcgcggcataataatcagccagtggggcagtgtctacgatcttttgaggggaaaatgaaaattttccccggtttccggtatcagacctgagtggcgctaaccatccggcgcaggcaggcgatttgcagtacggctggaatcgtcacgcgataggcgctgccgctgaccgctttaaccccatttagtgccgcacctacagggccttccagccccgcgccgcgcagcaaaccatgcccaagtacgctcattgctgcgtgggtgcgtaaaatgcgggtcagttggctggaaagcaaatggctcacaccttttgccaataatttgtctttcatcagcagcggcagcagctcttccagctcattcaccctggcatcgaccgcgtgcagaaactcctgcttatgttcctcgtccattttcttccaggtattacgcagaaattgttccagtaactgttgctcaatttcaaacgtagacatctctttgtcggctttcagcttcaatcgcttactaacatcgagcaaaatggcccgatacaatttaccgtgtccgcgcagtttgttggcgatactatcgccaccaaaatgctgtaattctccggcaatcagctgccagttgcggcgatgttgctcgggatgcccttccatgcttttaaacagttcgttgcgcatcagtacgctggagaggcgagttttgcctttttcattatgggtgagcaatcgggcgaaatttgccaactgttcctcactacaatgctgaagaaaatccagatcactatcattcaggtaattaacattcattttttgtggcttctatattctggcgttagtcgtcgccgataattttcagcgtggccatatcgctactgttcaccgtatgaccgctaaaggtgattttactgacgcagcgtttattgtcgttatcgctgttaatgttgatccagtcagtggtttgcccttcttttatttcactaggaatattcaggctctgactggcgctacgggcggctttgaaataaacgcttgcaccgcttaactgtaaatcgccatggtcggcagagagttgtatgcgtttcacaatgcgacaaacaggaagtttcagcgccagatcgttggtttcgttacgcggcattgcaatggcgccgaggagtttatggtcgtttgcctgcgccgtgcagcacagcatcaggctaatcgccaggctggcggaaatcgtaaaaacggatttcataaggattctcttagtgggaagaggtagggggatgaatacccactagtttactgctgataaagagaagattcaggcacgtaatcttttctttttattacaattttttgatgaatgccttggctgcgattcattctttatatgaataaaattgctgtcaattttacgtcttgtcctgccatatcgcgaaatttctgcgcaaaagcacaaaaaatttttgcatctcccccttgatgacgtggtttacgaccccatttagtagtcaaccgcagtgagtgagtctgcaaaaaaatgaaattgggcagttgaaaccagacgtttcgcccctattacagactcacaaccacatgatgaccgaatatatagtggagacgtttagatgggtaaaataattggtatcgacctgggtactaccaactcttgtgtagcgattatggatggcaccactcctcgcgtgctggagaacgccgaaggcgatcgcaccacgccttctatcattgcctatacccaggatggtgaaactctagttggtcagccggctaaacgtcaggcagtgacgaacccgcaaaacactctgtttgcgattaaacgcctgattggtcgccgcttccaggacgaagaagtacagcgtgatgtttccatcatgccgttcaaaattattgctgctgataacggcgacgcatgggtcgaagttaaaggccagaaaatggcaccgccgcagatttctgctgaagtgctgaaaaaaatgaagaaaaccgctgaagattacctgggtgaaccggtaactgaagctgttatcaccgtaccggcatactttaacgatgctcagcgtcaggcaaccaaagacgcaggccgtatcgctggtctggaagtaaaacgtatcatcaacgaaccgaccgcagctgcgctggcttacggtctggacaaaggcactggcaaccgtactatcgcggtttatgacctgggtggtggtactttcgatatttctattatcgaaatcgacgaagttgacggcgaaaaaaccttcgaagttctggcaaccaacggtgatacccacctggggggtgaagacttcgacagccgtctgatcaactatctggttgaagaattcaagaaagatcagggcattgacctgcgcaacgatccgctggcaatgcagcgcctgaaagaagcggcagaaaaagcgaaaatcgaactgtcttccgctcagcagaccgacgttaacctgccatacatcactgcagacgcgaccggtccgaaacacatgaacatcaaagtgactcgtgcgaaactggaaagcctggttgaagatctggtaaaccgttccattgagccgctgaaagttgcactgcaggacgctggcctgtccgtatctgatatcgacgacgttatcctcgttggtggtcagactcgtatgccaatggttcagaagaaagttgctgagttctttggtaaagagccgcgtaaagacgttaacccggacgaagctgtagcaatcggtgctgctgttcagggtggtgttctgactggtgacgtaaaagacgtactgctgctggacgttaccccgctgtctctgggtatcgaaaccatgggcggtgtgatgacgacgctgatcgcgaaaaacaccactatcccgaccaagcacagccaggtgttctctaccgctgaagacaaccagtctgcggtaaccatccatgtgctgcagggtgaacgtaaacgtgcggctgataacaaatctctgggtcagttcaacctagatggtatcaacccggcaccgcgcggcatgccgcagatcgaagttaccttcgatatcgatgctgacggtatcctgcacgtttccgcgaaagataaaaacagcggtaaagagcagaagatcaccatcaaggcttcttctggtctgaacgaagatgaaatccagaaaatggtacgcgacgcagaagctaacgccgaagctgaccgtaagtttgaagagctggtacagactcgcaaccagggcgaccatctgctgcacagcacccgtaagcaggttgaagaagcaggcgacaaactgccggctgacgacaaaactgctatcgagtctgcgctgactgcactggaaactgctctgaaaggtgaagacaaagccgctatcgaagcgaaaatgcaggaactggcacaggtttcccagaaactgatggaaatcgcccagcagcaacatgcccagcagcagactgccggtgctgatgcttctgcaaacaacgcgaaagatgacgatgttgtcgacgctgaatttgaagaagtcaaagacaaaaaataatcgccctataaacgggtaattatactgacacgggcgaaggggaatttcctctccgcccgtgcattcatctaggggcaatttaaaaaagatggctaagcaagattattacgagattttaggcgtttccaaaacagcggaagagcgtgaaatcagaaaggcctacaaacgcctggccatgaaataccacccggaccgtaaccagggtgacaaagaggccgaggcgaaatttaaagagatcaaggaagcttatgaagttctgaccgacagccaaaaacgtgcggcatacgatcagtatggtcatgctgcgtttgagcaaggtggcatgggcggcggcggttttggcggcggcgcagacttcagcgatatttttggtgacgttttcggcgatatttttggcggcggacgtggtcgtcaacgtgcggcgcgcggtgctgatttacgctataacatggagctcaccctcgaagaagctgtacgtggcgtgaccaaagagatccgcattccgactctggaagagtgtgacgtttgccacggtagcggtgcaaaaccaggtacacagccgcagacttgtccgacctgtcatggttctggtcaggtgcagatgcgccagggattcttcgctgtacagcagacctgtccacactgtcagggccgcggtacgctgatcaaagatccgtgcaacaaatgtcatggtcatggtcgtgttgagcgcagcaaaacgctgtccgttaaaatcccggcaggggtggacactggagaccgcatccgtcttgcgggcgaaggtgaagcgggcgagcatggcgcaccggcaggcgatctgtacgttcaggttcaggttaaacagcacccgattttcgagcgtgaaggcaacaacctgtattgcgaagtcccgatcaacttcgctatggcggcgctgggtggcgaaatcgaagtaccgacccttgatggtcgcgtcaaactgaaagtgcctggcgaaacccagaccggtaagctattccgtatgcgcggtaaaggcgtcaagtctgtccgcggtggcgcacagggtgatttgctgtgccgcgttgtcgtcgaaacaccggtaggcctgaacgaaaggcagaaacagctgctgcaagagctgcaagaaagcttcggtggcccaaccggcgagcacaacagcccgcgcagtaagagcttctttgatggtgtgaagaagttttttgacgacctgacccgctaacctccccaaaagcctgcccgtgggcaggcctgggtaaaaatagggtgcgttgaagatatgcgagcacctgtaaagtggcggggatcactctacctcaatgtgtatcacaatatccatattctttgtgggggagtctggagattgagtagatattcttgttcagaatgtatcagccgatggttctacgattcttaagccacgaagagttcagatagtacaacggcatgtctcttttgactatctggcaaccggcagtgtgttctctcacgcatcacaaaagcagcaggcataaaaaaacccgcttgcgcgggctttttcacaaagcttcagcaaattggcgattaagccagtttgttgatctgtgcagtcaggttagccttatgacgtgcagctttgtttttgtggatcagacctttagcagcctgacggtccacgatcggttgcatttcgttaaatgctttctgtgcagcagctttgtcgccagcttcgatagctgcgtatactttcttgatgaaagtacgcatcatagagcgacggcttgcgttgtgcttacgagccttttcagactgaatggcgcgcttcttagcacttttgatattagccaaggtccaactcccaaatgtgttctatatggacaattcaaaggccgaggaatatgcccttttagccttcttttgtcaatggatttgtgcaaataagcgccgttaatgtgccggcacagcttacgtagtgatggcgcaggattctaccagcttgcggggtgtgaatacagcttttccgcgataaaaattgcagcaggcggtcagtttcttcccgtgatttgcgccatggcaatgaaaagccacttctttctgattagcgtactcaatcgccggttaaccttgaccgctgtacaaggtatactcggacgatttagcctgttttgagccagacatgaagctgatacgcggcatacataatctcagccaggccccgcaagaagggtgtgtgctgactattggtaatttcgacggcgtgcatcgcggtcatcgcgcgctgttacagggcttgcaggaagaagggcgcaagcgcaacttaccggtgatggtgatgctttttgaacctcaaccactggaactgtttgctaccgataaagccccggcaagactgacccggctgcgggaaaaactgcgttaccttgcagagtgtggcgttgattacgtgctgtgcgtgcgtttcgacaggcgtttcgcggcgttaaccgcgcaaaatttcatcagcgatcttctggtgaagcatttgcgcgtaaaatttcttgccgtaggtgatgatttccgctttggcgctggtcgtgaaggcgatttcttgttattacagaaagctggcatggaatacggcttcgatatcaccagtacgcaaactttttgcgaaggtggcgtgcgcatcagcagcaccgccgtgcgtcaggcccttgcggatgacaatctggctctggcagagagtttactggggcacccgtttgccatctccgggcgtgtagtccacggtgatgaattagggcgcactataggtttcccgacggcgaatgtaccgctgcgccgtcaggtttccccggtgaaaggggtttatgcggtagaagtgctgggcctcggtgaaaagccgttacccggcgtggcaaacatcggaacacgcccaacggttgccggtattcgccagcagctggaagtgcatttgttagatgttgcaatggacctttacggtcgccatatacaagtagtgctgcgtaaaaaaatacgcaatgagcagcgatttgcgagcctggacgaactgaaagcgcagattgcgcgtgatgaattaaccgcccgcgaattttttgggctaacaaaaccggcttaagcctgttatgtaatcaaaccgaaatacggaaccgagaatctgatgagtgactataaaagtaccctgaatttgccggaaacagggttcccgatgcgtggcgatctcgccaagcgcgaacccggaatgctggcgcgttggactgatgatgatctgtacggcatcatccgtgcggctaaaaaaggcaaaaaaaccttcattctgcatgatggccctccttatgcgaatggcagcattcatattggtcacagcgttaacaagattctgaaagacattatcgtgaagtccaaagggctttccggttatgacagcccgtatgtgcctggctgggactgccacggtctgccgatcgagctgaaagtcgagcaagaatacggtaagccgggtgagaaattcaccgccgccgagttccgcgccaagtgccgcgaatacgcggcgacccaggttgacggtcaacgcaaagactttatccgtctgggcgtgctgggcgactggagccacccgtacctgaccatggacttcaaaactgaagccaacatcatccgcgcgctgggcaaaatcatcggcaacggtcacctgcacaaaggcgcgaagccagttcactggtgcgttgactgccgttctgcgctggcggaagcggaagttgagtattacgacaaaacttctccgtccatcgacgttgctttccaggcagtcgatcaggatgcactgaaagcaaaatttgccgtaagcaacgttaacggcccaatcagcctggtaatctggaccaccacgccgtggactctgcctgccaaccgcgcaatctctattgcaccagatttcgactatgcgctggtgcagatcgacggtcaggccgtgattctggcgaaagatctggttgaaagcgtaatgcagcgtatcggcgtgaccgattacaccattctcggcacggtaaaaggtgcggagcttgagctgctgcgctttacccatccgtttatgggcttcgacgttccggcaatcctcggcgatcacgttaccctggatgccggtaccggtgccgttcacaccgcgcctggccacggcccggacgactatgtgatcggtcagaaatacggcctggaaaccgctaacccggttggcccggacggcacttatctgccgggcacttatccgacgctggatggcgtgaacgtcttcaaagcgaacgacatcgtcgttgcgctgctgcaggaaaaaggcgcgctgctgcacgttgagaaaatgcagcacagctatccgtgctgctggcgtcacaaaacgccgatcatcttccgcgcgacgccgcagtggttcgtcagcatggatcagaaaggtctgcgtgcgcagagtctgaaagagatcaaaggcgtgcagtggatcccggactggggccaggcgcgtatcgagagcatggttgctaaccgtcctgactggtgtatctcccgtcagcgcacctggggtgtaccgatgagtctgttcgtgcacaaagacacggaagagctgcatccgcgtacccttgaactgatggaagaagtggcaaaacgcgttgaagtcgatggcatccaggcgtggtgggatctcgatgcgaaagagatcctcggcgacgaagctgatcagtacgtgaaagtgccggacacattggatgtatggtttgactccggatctacccactcttctgttgttgacgtgcgtccggaatttgccggtcacgcagcggacatgtatctggaaggttctgaccaacaccgcggctggttcatgtcttccctaatgatctccaccgcgatgaagggtaaagcgccgtatcgtcaggtactgacccacggctttaccgtggatggtcagggccgcaagatgtctaaatccatcggcaataccgttagcccgcaggatgtgatgaacaaactgggcgcggatattctgcgtctgtgggtggcaagtaccgactacaccggtgaaatggccgtttctgacgagatcctgaaacgtgctgccgatagctatcgtcgtatccgtaacaccgcgcgcttcctgctggcaaacctgaacggttttgatccagcaaaagatatggtgaaaccggaagagatggtggtactggatcgctgggccgtaggttgtgcgaaagcggcacaggaagacatcctcaaggcgtacgaagcatacgatttccacgaagtggtacagcgtctgatgcgcttctgctccgttgagatgggttccttctacctcgacatcatcaaagaccgtcagtacaccgccaaagcggacagtgtggcgcgtcgtagctgccagactgcgctatatcacatcgcagaagcgctggtgcgctggatggcaccaatcctctccttcaccgctgatgaagtgtggggctacctgccgggcgaacgtgaaaaatacgtcttcaccggtgagtggtacgaaggcctgtttggcctggcagacagtgaagcgatgaacgatgcgttctgggacgagctgttgaaagtgcgtggcgaagtgaacaaagtcattgagcaagcgcgtgccgacaagaaagtgggtggcagcctggaagcggcagtaaccttgtatgcagaaccggaactgagcgcgaaactgaccgcgctgggcgatgaattacgatttgtcctgttgacctccggcgctaccgttgcagactataacgacgcacctgctgatgctcagcagagcgaagtactcaaagggctgaaagtcgcgttgagtaaagccgaaggtgagaagtgcccacgctgctggcactacacccaggatgtcggcaaggtggcggaacacgcagaaatctgcggccgctgtgtcagcaacgtcgccggtgacggtgaaaaacgtaagtttgcctgatgagtcaaagcatctgtagtacagggctacgctggctgtggctggtggtagtcgtgctgattatcgatctgggcagcaaatacctgatcctccagaactttgctctgggggatacggtcccgctgttcccgagccttaatctgcattatgcgcgtaactatggcgcggcgtttagtttccttgccgatagcggcggctggcagcgttggttctttgccggtattgcgattggtattagcgtgatcctggcagtgatgatgtatcgcagcaaggccacgcagaagctaaacaatatcgcttacgcgctgattattggcggcgcgctgggcaacctgttcgaccgcctgtggcacggcttcgttgtcgatatgatcgacttctacgtcggcgactggcacttcgccaccttcaaccttgccgatactgccatctgtgtcggtgcggcactgattgtgctggaaggttttttgccttctagagcgaaaaaacaataataaaccctgccggatgcgatgctgacgcatcttatccggcctacagattgctgcgaaatcgtaggccggataaggcgtttacgccgcatccggcaaaaatccttaaatataagagcaaacctgcatgtctgaatctgtacagagcaatagcgccgtcctggtgcacttcacgctaaaactcgacgatggcaccaccgccgagtctacccgcaacaacggtaaaccggcgctgttccgcctgggtgatgcttctctttctgaagggctggagcaacacctgttggggctgaaagtgggcgataaaaccaccttcagcttggagccagatgcggcgtttggcgtgccgagtccggacctgattcagtacttctcccgccgtgaatttatggatgcaggcgagccagaaattggcgcaatcatgctttttaccgcaatggatggcagtgagatgcctggcgtgatccgcgaaattaacggcgactccattaccgttgatttcaaccatccgctggccgggcagaccgttcattttgatattgaagtgctggaaatcgatccggcactggaggcgtaacatgcagatcctgttggccaacccgcgtggtttttgtgccggggtagaccgcgctatcagcattgttgaaaacgcgctggccatttacggcgcaccgatatatgtccgtcacgaagtggtacataaccgctatgtggtcgatagcttgcgtgagcgtggggctatctttattgagcagattagcgaagtaccggacggcgcgatcctgattttctccgcacacggtgtttctcaggcggtacgtaacgaagcaaaaagtcgcgatttgacggtgtttgatgccacctgtccgctggtgaccaaagtgcatatggaagtcgcccgcgccagtcgccgtggcgaagaatctattctcatcggtcacgccgggcacccggaagtggaagggacaatgggccagtacagtaacccggaagggggaatgtatctggtcgaaagcccggacgatgtgtggaaactgacggtcaaaaacgaagagaagctctcctttatgacccagaccacgctgagcgtggatgacacgtctgatgtgatcgacgcgctgcgtaaacgcttcccgaaaattgtcggtccgcgcaaagatgacatctgctacgccacgactaaccgtcaggaagcggtacgcgccctggcagaacaggcggaagttgtgttggtggtcggtagcaaaaactcctccaactccaaccgtctggcggagctggcccagcgtatgggcaaacgcgcgtttttgattgacgatgcgaaagacatccaggaagagtgggtgaaagaggttaaatgcgtcggcgtgactgcgggcgcaagcgctccggatattctggtgcagaatgtggtggcgcgtttgcagcagctgggcggtggtgaagccattccgctggaaggccgtgaagaaaacattgttttcgaagtgccgaaagagctgcgtgtcgatattcgtgaagtcgattaagtcattagcagcctaagttatgcgaaaatgccggtcttgttaccggcattttttatggagaaaacatgcgtttacctatcttcctcgatactgaccccggcattgacgatgccgtcgccattgccgccgcgatttttgcacccgaactcgacctgcaactgatgaccaccgtcgcgggtaatgtcagcgttgagaaaactacccgcaatgccctgcaactgctgcatttctggaatgcggagattccgctcgcccaaggggccgctgtgccactggtacgcgcaccgcgtgatgcggcatctgtgcacggcgaaagcggaatggctggctacgactttgttgagcacaaccgaaagccgctcgggataccggcgtttctggcgattcgggatgccctgatgcgtgcaccagagcctgttaccctggtggccatcggcccgttaaccaatattgcgctgttacttagtcaatgcccggaatgcaagccgtatattcgccgtctggtgatcatgggtggttctgccggacgcggcaactgtacgccaaacgccgagtttaatattgctgccgatccagaagctgctgcctgtgtcttccgcagtggtattgaaatcgtcatgtgcggtttggatgtcaccaatcaggcaatattaactcctgactatctctctacactgccgcagttaaaccgtaccgggaaaatgcttcacgccctgtttagccactaccgtagcggcagtatgcaaagcggcttgcgaatgcacgatctctgcgccatcgcctggctggtgcgcccggacctgttcactctcaaaccctgttttgtggcagtggaaactcagggcgaatttaccagtggcacgacggtggttgatatcgacggttgcctgggcaagccagccaatgtacaggtggcattggatctggatgtgaaaggcttccagcagtgggtggctgaggtgctggctctggcgagctaacctgtcacatgttattggcatgcagtcattcatcgactcatgcctttcactgatatccctccctgtttatcattaatttctaattatcagcgtttttggctggcggcgtagcgatgcgctggttactctgaaaacggtctatgcaaattaacaaaagagaatagctatgcatgatgcaaacatccgcgttgccatcgcgggagccggggggcgtatgggccgccagttgattcaggcggcgctggcattagagggcgtgcagttgggcgctgcgctggagcgtgaaggatcttctttactgggcagcgacgccggtgagctggccggagccgggaaaacaggcgttaccgtgcaaagcagcctcgatgcggtaaaagatgattttgatgtgtttatcgattttacccgtccggaaggtacgctgaaccatctcgctttttgtcgccagcatggcaaagggatggtgatcggcactacggggtttgacgaagccggtaaacaagcaattcgtgacgccgctgccgatattgcgattgtctttgctgccaattttagcgttggcgttaacgtcatgcttaagctgctggagaaagcagccaaagtgatgggtgactacaccgatatcgaaattattgaagcacatcatagacataaagttgatgcgccgagtggcaccgcactggcaatgggagaggcgatcgcccacgcccttgataaagatctgaaagattgcgcggtctacagtcgtgaaggccacaccggtgaacgtgtgcctggcaccattggttttgccaccgtgcgtgcaggtgacatcgttggtgaacataccgcgatgtttgccgatattggcgagcgtctggagatcacccataaggcgtccagccgtatgacatttgctaacggcgcggtaagaagcgctttgtggttgagtggtaaggaaagcggtctttttgatatgcgagatgtacttgatctcaataatttgtaaccacaaaatatttgttatggtgcaaaaataacacatttaatttattgattataaagggctttaatttttggcccttttatttttggtgttatgtttttaaattgtctataagtgccaaaaattacatgttttgtcttctgtttttgttgttttaatgtaaattttgaccatttggtccacttttttctgctcgtttttatttcatgcaatcttcttgctgcgcaagcgttttccagaacaggttagatgatctttttgtcgcttaatgcctgtaaaacatgcatgagccacaaaataatataaaaaatcccgccattaagttgacttttagcgcccatatctccagaatgccgccgtttgccagaaattcgtcggtaagcagatttgcattgatttacgtcatcattgtgaattaatatgcaaataaagtgagtgaatattctctggagggtgttttgattaagagtgcgctattggttctggaagacggaacccagtttcacggtcgggccataggggcaacaggtagcgcggttggggaagtcgttttcaatactagtatgaccggttatcaagaaatcctcactgatccttcctattctcgtcaaatcgttactcttacttatccccatattggcaatgtcggcaccaatgacgccgatgaagaatcttctcaggtacatgcacaaggtctggtgattcgcgacctgccgctgattgccagcaacttccgtaataccgaagacctctcttcttacctgaaacgccataacatcgtggcgattgccgatatcgatacccgtaagctgacgcgtttactgcgcgagaaaggcgcacagaatggctgcattatcgcgggcgataacccggatgcggcgctggcgttagaaaaagcccgcgcgttcccaggtctgaatggcatggatctggcaaaagaagtgaccaccgcagaagcctatagctggacacaagggagctggacgttgaccggtggcctgccagaagcgaaaaaagaagacgagctgccgttccacgtcgtggcttatgattttggtgccaagcgcaacatcctgcggatgctggtggatagaggctgtcgcctgaccatcgttccggcgcaaacttctgcggaagatgtgctgaaaatgaatccagacggcatcttcctctccaacggtcctggcgacccggccccgtgcgattacgccattaccgccatccagaaattcctcgaaaccgatattccggtattcggcatctgtctcggtcatcagctgctggcgctggcgagcggtgcgaagactgtcaaaatgaaatttggtcaccacggcggcaaccatccggttaaagatgtggagaaaaacgtggtaatgatcaccgcccagaaccacggttttgcggtggacgaagcaacattacctgcaaacctgcgtgtcacgcataaatccctgttcgacggtacgttacagggcattcatcgcaccgataaaccggcattcagcttccaggggcaccctgaagccagccctggtccacacgacgccgcgccgttgttcgaccactttatcgagttaattgagcagtaccgtaaaaccgctaagtaatcaggagtaaaagagccatgccaaaacgtacagatataaaaagtatcctgattctgggtgcgggcccgattgttatcggtcaggcgtgtgagtttgactactctggcgcgcaagcgtgtaaagccctgcgtgaagagggttaccgcgtcattctggtgaactccaacccggcgaccatcatgaccgacccggaaatggctgatgcaacctacatcgagccgattcactgggaagttgtacgcaagattattgaaaaagagcgcccggacgcggtgctgccaacgatgggcggtcagacggcgctgaactgcgcgctggagctggaacgtcagggcgtgttggaagagttcggtgtcaccatgattggtgccactgccgatgcgattgataaagcagaagaccgccgtcgtttcgacgtagcgatgaagaaaattggtctggaaaccgcgcgttccggtatcgcacacacgatggaagaagcgctggcggttgccgctgacgtgggcttcccgtgcattattcgcccatcctttaccatgggcggtagcggcggcggtatcgcttataaccgtgaagagtttgaagaaatttgcgcccgcggtctggatctctctccgaccaaagagttgctgattgatgagagcctgatcggctggaaagagtacgagatggaagtggtgcgtgataaaaacgacaactgcatcatcgtctgctctatcgaaaacttcgatgcgatgggcatccacaccggtgactccatcactgtcgcgccagcccaaacgctgaccgacaaagaatatcaaatcatgcgtaacgccagcatggcggtgctgcgtgaaatcggcgttgaaaccggtggttccaacgttcagtttgcggtgaacccgaaaaacggtcgtctgattgttatcgaaatgaacccacgcgtgtcccgttctagcgcgctggcgagcaaagcgaccggtttcccgattgctaaagtggcggcgaaactggcggtgggttacaccctcgacgaactgatgaacgacatcactggcggacgtactccggcctccttcgagccgtccatcgactatgtggttactaaaattcctcgcttcaacttcgaaaaattcgccggtgctaacgaccgtctgaccactcagatgaaaagcgttggcgaagtgatggcgattggtcgcacgcagcaggaatccctgcaaaaagcgctgcgcggcctggaagtcggtgcgactggattcgacccgaaagtgagcctggatgacccggaagcgttaaccaaaatccgtcgcgaactgaaagacgcaggcgcagatcgtatctggtacatcgccgatgcgttccgtgcgggcctgtctgtggacggcgtcttcaacctgaccaacattgaccgctggttcctggtacagattgaagagctggtgcgtctggaagagaaagtggcggaagtgggcatcactggcctgaacgctgacttcctgcgccagctgaaacgcaaaggctttgccgatgcgcgcttggcaaaactggcgggcgtacgcgaagcggaaatccgtaagctgcgtgaccagtatgacctgcacccggtttataagcgcgtggatacctgtgcggcagagttcgccaccgacaccgcttacatgtactccacttatgaagaagagtgcgaagcgaatccgtctaccgaccgtgaaaaaatcatggtgcttggcggcggcccgaaccgtatcggtcagggtatcgaattcgactactgttgcgtacacgccagcctggcgctgcgcgaagacggttacgaaaccattatggttaactgtaacccggaaaccgtctccaccgactacgacacttccgaccgcctctacttcgagccggtaactctggaagatgtgctggaaatcgtgcgtatcgagaagccgaaaggcgttatcgtccagtacggcggtcagaccccgctgaaactggcgcgcgcgctggaagctgctggcgtaccggttatcggcaccagcccggatgctatcgaccgtgcagaagaccgtgaacgcttccagcatgcggttgagcgtctgaaactgaaacaaccggcgaacgccaccgttaccgctattgaaatggcggtagagaaggcgaaagagattggctacccgctggtggtacgtccgtcttacgttctcggcggtcgggcgatggaaatcgtctatgacgaagctgacctgcgtcgctacttccagacggcggtcagcgtgtctaacgatgcgccagtgttgctggaccacttcctcgatgacgcggtagaagttgacgtggatgccatctgcgacggcgaaatggtgctgattggcggcatcatggaacatattgagcaggcgggcgtgcactccggtgactccgcatgttctctgccagcctacaccttaagtcaggaaattcaggatgtgatgcgccagcaggtgcagaaactggccttcgaattgcaggtgcgcggcctgatgaacgtgcagtttgcggtgaaaaacaacgaagtctacctgattgaagttaacccgcgtgcggcgcgtaccgttccgttcgtctccaaagccaccggcgtaccgctggcaaaagtggcggcgcgcgtgatggctggcaaaagcctggctgagcagggcgtaaccaaagaagttatcccgccgtactacagcgtgaaagaagtggtgctgccgttcaataaattcccgggcgttgacccgctgttagggccagaaatgcgctctaccggggaagtcatgggcgtgggccgcaccttcgctgaagcgtttgccaaagcgcagctgggcagcaactccaccatgaagaaacacggtcgtgcgctgctttccgtgcgcgaaggcgataaagaacgcgtggtggacctggcggcaaaactgctgaaacagggcttcgagctggatgcgacccacggcacggcgattgtgctgggcgaagcaggtatcaacccgcgtctggtaaacaaggtgcatgaaggccgtccgcacattcaggaccgtatcaagaatggcgaatatacctacatcatcaacaccaccagtggccgtcgtgcgattgaagactcccgcgtgattcgtcgcagtgcgctgcaatataaagtgcattacgacaccaccctgaacggcggctttgccaccgcgatggcgctgaatgccgatgcgactgaaaaagtaattagcgtgcaggaaatgcacgcacagatcaaataatagcgtgtcatggcagatatttttcatccgctaatttgatcgaataactaatacggttctctgatgaggaccgtttttttttgcccattaagtaaatcttttggggaatcgatatttttgatgacataagcaggatttagctcacacttatcgacggtgaagttgcatactatcgatatatccacaattttaatatggccttgtttaattgcttcaaaacgagtcatagccagacttttaatttgtgaaactggagttcgtatgtgtgaaggatatgttgaaaaaccactctacttgttaatcgccgaatggatgatggctgaaaatcggtgggtgatagcaagagagatctctattcatttcgatattgaacacagcaaggcggttaataccctgacttatattctgagcgaagtcacagaaataagctgcgaagttaagatgatccctaataagctggaagggcggggatgccagtgtcagcgactggttaaagtggtcgatatcgatgagcaaatttacgcgcgcctgcgcaataacagtcgggaaaaattagtcggtgtaagaaagacgccgcgtattcctgccgttccgctcacggaacttaaccgcgagcagaagtggcagatgatgttgagtaagagtatgcgtcgttaattttatctcgttgataccgggcgtcctgcttgccagatgcgatgttgtagcatcttatccagcaaccaggtcgcatccggcaagatcaccgtttaggcgtcacatccgtcgtcccctgcaaacgggggcgattttcctccatttgcctcagtggctgcgtttcatgtaagcttacatgacagcgcccgacaagatcctgatactctttggtattcaaccgtttccagtgtaactcgtcgtcactaacattgcgtacagcgcgggctggcgtacccatcaacaactggcgtttctcgccgcgaaagcccgctttgacaaagctcatggcggcaacaatgctctcttcgccaatgaccgcgccatccataatcacgctgttcatcccgaccaatgcatcgcgaccaatcaaacaaccatgcaggatcgctccgtgcccgatatggccgttttccccaacgatagtgtcagtgtcgcagtagccatgcataatgcagccatcctgaatattggctcccgcttgcacgatcaaccgcccgtagtcaccacgcagactggcgagtgggccgatgtagacaccggctcccacaatcacatcgccaatcaagacggcactgggatggacaaacgccgtcgggtgaaccaccggaattaacccctcaaaggcgtaatagctcacggttgttaacgtcctttccacaccggatcgcgcttctcggcaaacgccagcggcccttcaatggcatcttcgctatgcagaacgcttggatagtgtttcaacacgccgctgcgaatatagcgatacgcttcttctaccggcatttcgctggtggtgcggtagatctctttcagcgccgcaatcgccagcggggcgctgttaaccagctgctgagccagttcgcgggcgttatccatcagttccgcctggctaaccacgcggttgactatcccccaacgcagcgcctcttctgcgcccattcgtctgccggtcatcaccatttcattgacgatggcaggcggcaggatcttcggcagacgcagcacaccgccgctgtcaggaacgatgcccagtttggcttccggcagggcgaagctggcgttatcggcacaaacaataaaatctgccgccagcgccagttcaaagccgccgccaaaggcatagccgttcacagctgcgataaccggtttgtcgagattgaaaatttcggttaatcccgcaaaaccacccggaccaaagtcagcatccggtgcttcgccttctgctgccgcttttaaatcccagcccgcggaaaagaacttctctccggcaccggtaataatggcgacacgtaattgcggatcgtcacggaaatttagaaatacttcgcccatttcaaagctggtttttgcatcaatagcattcgcttttggacgatcaagggtaatttccagaatacttccattgcgggtcagatgtaaactttcactcattccttttctccatttttgctttttcagggagctcaacatccctgcaaaaaatgcatattgttttagagtgtgattattagctggcagggtagttccctgctgtttcatttatttcagattctttctaattattttcccgctgcaattacgtggcagatcttttctgatctccagataagagggcactttaaatttcgccatattttgttcgcagaagcggaaaaattcctcttcgctcaatgtttcaccttcattcagcaccacaaatgctttgatggcttcatcgcgaatgctatctttaatacccacaaccacgatgtcctgaattttcgggtgcgcggcgataatattttccagctccacgcaggagacattctcgccgccacgtttaatcatattgcagcggcgatcgacgaaataaaaaaagtcctcttcgtcgcggtatccggtatcgccggtatgcagccagccatcggcttccagcactttcgcagtggcttgtgggttgagaaagtactctttgaagatggttttcccaggtatgcctttaatgcagatttcaccgatctcaccagccgggagcgggcgattgtgatcgtcgcggatctccgcttcgtagcaaaaccccacccgaccaatgctcggccagcgtcgtttatcgccaggacgatcgccgataatgcccacaatggtttccgtcatcccataagacgtcagcaagcgaacgccgaagcgttcacaaaacgcatctttttcctgctcgctcaagttgagataaaacatcacttcccgcaggcggtgttgctgatcgttcgcactaggcggctgtaccatcaacgtacggatcatcatcggaatacattcggtaacggtggcgcggtacttctgtacctgtccccagaaggcgcgggcgctgtatttctcgaccagcacaaaggtggccccggcagaaaacgccgccatcgccgcagtacactggcaatcgatatgaaacgcaggcattaccgtcaggtagacgtcatcgtcacgcagtgcacactgccaggcggagtaatatccagcgaagcgcaggttgtaatgggtaatcaccacacctttcggtcgggaggtggtgccggaggtgaagagaatttccgccgtatcgtcagtgcttagcggcggtgcatagcacaaggtggcaggttgttgatttttcagttgagtaaagctactcacgccatcatcagcgggaagtgccacatctgtcaggcaaatgtgccgcaattgagtggcatcttcctgctgaatctgttgatacataggatagaattgcgcactggtcaccagcaggcacgcctggctattttgcaggatccacgcgctttccttgcacaacaggcgggcgttaatcggcaccataatcgcgccaatttttgccagcccgaaccagcaaaagataaattccgggcagttgtcgagatgtagtgcaaccttgtcgcctttgcgaatccccagcgtataaaacaggtttgccgtgcggttaatctcctgatttaactcaagataactataccggttaacgactccgccgctggattcacaaatcagcgccgttttatgaccgtaaacgtccgcaagatcgtcccacatttgacgtagatgttgtccgccaatgatatccattgcacctctatccatttttgttcgtttgttattgggcgggcgctagtcaggcaagccgactgacgccacgcgtttagtcctcaactttggccagacctttgctgaccaactcctgaatgtcgttttcgctgtagccgatatttttcaaaatggcagccgtgtccataccatgactgggcattccgcgccagatttgtccggggttatttttgaatttcggcatgatgttcggccctttgcaggtgcgaccatccatcgtttgccactgagtgatactttcgcgagccacatactgtggattgctttccagttccggtacggtcagcactttggcgcaggcgatattcagttcagcaaagcgttcttttacttccgcgatggtatgtgtcgccagccaggcatcgagtttctcttcaaccagtgggccgtaagggcattcgatacggtggataagctgagtgccttccgggatttctggcgtgccaagcagatgtgcgaggccaatatctttaaagcactcttcaatttgggtaatgcccaccagttccatcacgatgtagccgtcggcacatttatacagaccgcaaccggcgtagtagggatctttacctttgctcatgcgcgggcacatttcgccgccgttgaagtaatccatcatgaagtactggcccatacgcagcatcacttcatacatggcgatgtcgatactttcgcctttaccggtttcacgcactttatgcagtgctgccagcgccgccgtggtggcggtcaggccagaaaagtaatcggcggtatacgggaaggcaggcattggctggtcaacatcaccgttctgaatcaggtaaccactaaaggcctgggcgatagtgttataggccggaagattggtgtactcctcggtgccgtactgaccaaaaccggacaggtgagcgataaccagtttcgggttgtgctgccacagtacttcatcggtaatgccacgacgggcaaaggccggacctttactggcttcgatgaagatatcggtggtttccattaatttcagaaacgcttcgcggccttcatctttgaaaatatttaagctcagcgcgtgcaaattgcggcgggagagttgcgggtagttcggttgaacgcgaatggtgtcggcccaggcgacgttctcgatccagataacttccgcgccccattctgcgaacatttgcccggcaaacggtccggcgatttcgataccggagaagacaacgcgcaatccggccaacggcccgaatttcggcatgggtagatgatccattatttgctcctgaaaaatttatgtagcgcatgactgccggatgcggcgtaaacgctttatccggcctacattcgtgctcccgtaggcctgataagacgcatcagcgtcgcatcaggcagcgcacggacttagcggtattgcttcagcaccgcacgacccagcgtcaggatctgcatttcgtcagatcccccggagacgcggtctacacgcagatcacgccagaagcggctgatgcggtggttgcccgcaatcccgacaccgcccagcacctgcattgcgctatccacaacttcaaatgccgcattggcgcagaagtatttgcacatcgctgcatcgccagaggtgatggtgccgttgtctgctttccacgctgcttcatacagcatgtttttcatggagtttaatttgatcgccatgtgggcgaatttttcctgaatcaactggaaacgaccaatagcctcgccaaactgcacgcgctgattggcgtagcgcgccgcatcttcaaaggcgcacatcgccgtaccgtagttggtgagggctaccaggaaacgttcatggtcgaactcttctttgacgcggttaaagccgttaccttcccgaccgaacatgtctttctcgtccagttccacgtcgtcaaaggtgatttcacagcagctatccatacgcagaccgagcttttcaagtttggtcactttgatgcccggtttgctcatatcaacaaaccattcggtgtagacaggtttgtccggagaagccccgtcgcgcgccatcaccacgatgtacggggtgtaggcgctgctggtaataaaacacttactaccattaagataaatcttaccatttctacgggtataagtcgttttcaggctacccacgtcggagcccgcgcccggttcggtaatcgcactgttccacatctgcttaccggtgccgcggaaagccataattttgtcgatctgctcttgtgtgccttcgcgcaggaaggtgttgaacccgcccggcaactggtacagcacataggttggtgcccccagacgtcccagctccatccacacggcggcgagagtaacaaaccccgcgtccagaccaccgtgctcttcagggatcagcagactgtcgatacccatatccgccagtgctttgacaaaacgttccgggtagacgctgtcacggtcgcactcggcaaaataggcctcccagttttcgctggccatcagttcgcggataccggcgacaaacagttcctgctcatcatttaaattaaaatccatctttcaacctcttgatattttgggggttaattaatctttccagttctgtttcgcgtctttaataaaggagagcgtcaccataatgttgacgaagaacagcgggcatcctccggcgataatggcggtttgaatcggtttcaggccgccgagcgccagcagaacaataccgataatgccaaccagaatactccaaccgatacgcaccagcagaggtggttcttcaccatcgcgtacttcgcggcaagtggacatcgccagggtataagagcaggcgttaaccagcgtaacggtggcaataaagcagaggatgaagaagccccacatggtggcggtgctgagtggcagagcggcccaggtttcaatgatggcgcgcgccacaccgtactgttcgatcagatttggaatgttgatgatgtttttatctatcaacagcagagtgttactaccgagtacagtccacaggatccaggtactcgctgtcagccccagcaccatgccgaagcacagttcacgcacagtacgaccacgggagatgcgggcgaggaagatactcatctggatagcataaatcacccaccatgcccagtagaacacggtccagccctgcgggaagccgcctttagcgatgggatcggtatagaacaacatgcgcggcagatacatcagcaacatccccacgctatcggtgaagtagttcatgatgaagctggcaccgctgacaatgaacacccaacccagcatcaggaagctcaggtaactacgcacgtcactggcgatacgtacccctttttgcagaccgcaagcgacgcaaatggcgttgaggataatccagcaggtaatgatgatagcgtccagttgcagggtatgcggaatgccaaacaaccattgcatacactcggtcaccagcggcgtggcaaggcccagactggtacccatcgcgaagatcaaggcgacgagatagaagttgtcgacgatagtgccgaacaaccctttggcgtgtttttcacctaccagcggcaccagtgtgctgctggggcgaatcacttccattttgcggacaaagaagaagtaagcgaaggcgacactaaggaagctgtaagtggcccacggcagaggtccccagtggaacaagctgtaagccagccccaactctttcgcccctgtgctgttcggttctaagccaaacggcggggtggagatgtagtagtagatctcaatgcttccccagaacagtacggcagcagacgtacaggaggcgaacatcataaagatccaactggcggtgctaaattctggcggttcgttacctaaacgctttttggcatacgggccaaacaccagccagaaccaaccgaaaagcatcaccaccatataccattcaaatgcccatccccatacattggtgacgtaactgaatacagcattaataacgacattcgctgcatccagatctctgactgtaagccaacaaagtatgccgacgattattaacggcggaaagaaaaccttcggttctattcccgtttttctcttttcattcttcatgagttaattccactgtgaaaacgaatatttattttgcgttcccgtttgttttatttttgttaacatttaatataattattattaacctcgtggacgcgttaatggctaactcataatgggtattcaataagctgtattctgtgattggtatcacatttttgtttcgggtgaatagagggcgttttttcgttaattttgattaataatcagtttgttatgctctgttgtgagtaaaaaataacatctgactttcaatattggtgatccataaaacaatattgaaaatttctttttgctacgccgtgttttcaatattggtgaggaacttaacaatattgaaagttggatttatctgcgtgtgacattttcaatattggtgattaaagttttatttcaaaattaaagggcgtgatatctgtaattaacaccaccgatatgaacgacgtttccttcatgatttctggagatgcaatgaagattattacttgctataagtgcgtgcctgatgaacaggatattgcggtcaataatgctgatggtagtttagacttcagcaaagccgatgccaaaataagccaatacgatctcaacgctattgaagcggcttgccagctaaagcaacaggcagcagaggcgcaggtgacagccttaagtgtgggcggtaaagccctgaccaacgccaaagggcgtaaagatgtgctaagccgcggcccggatgaactgattgtggtgattgatgaccagttcgagcaggcactgccgcaacaaacggcgagcgcactggctgcagccgcccagaaagcaggctttgatctgatcctctgtggcgatggttcttccgacctttatgcccagcaggttggtctgctggtgggcgaaatcctcaatattccggcagttaacggcgtcagcaaaattatctccctgacggcagataccctcaccgttgagcgcgaactggaagatgaaaccgaaaccttaagcattccgctgcctgcggttgttgctgtttccactgatatcaactccccacaaattcctagcatgaaagccattctcggcgcggcgaaaaagcccgtccaggtatggagcgcggcggatattggttttaacgcagaggcagcctggagtgaacaacaggttgccgcgccgaaacagcgcgaacgtcagcgcatcgtgattgaaggcgacggcgaagaacagatcgccgcatttgctgaaaatcttcgcaaagtcatttaattacaggggatgctatgaacacgttttctcaagtctgggtattcagcgataccccttctcgtctgccggaactgatgaacggtgcgcaggctttagctaatcaaatcaacacctttgtcctcaatgatgccgacggcgcacaggcaatccagctcggcgctaatcatgtctggaaattaaacggcaaaccggacgatcggatgatcgaagattacgccggtgtcatggctgacactattcgccagcacggcgcagacggcctggtgctgctgccaaacacccgtcgcggcaaattactggcggcaaaactgggttatcgccttaaagcggcggtgtctaacgatgccagcaccgtcagcgtacaggacggtaaagcgacagtgaaacacatggtttacggtggtctggcgattggcgaagaacgcattgccacgccgtatgcggtactgaccatcagcagcggcacgttcgatgcggctcagccagacgcgagtcgcactggcgaaacgcacaccgtggagtggcaggctccggctgtggcgattacccgcacggcaacccaggcgcgccagagcaacagcgtcgatctcgacaaagcccgtctggtggtcagcgtcggtcgcggtattggcagcaaagagaacattgcgctggcagaacagctttgcaaggcgataggtgcggagttggcctgttctcgtccggtggcggaaaacgaaaaatggatggagcacgaacgctatgtcggtatctccaacctgatgctgaaacctgaactgtacctggcggtggggatctccgggcagatccagcacatggttggcgctaacgcgagccaaaccattttcgccatcaataaagataaaaatgcgccgatcttccagtacgcggattacggcattgttggcgacgccgtgaagatccttccggcgctgaccgcagctttagcgcgttgatccactctggcagggctgcattttggccctgccgctgacagggagctcttatgtccgaagatatctttgacgccatcatcgtcggtgcagggcttgccggtagcgttgccgcactggtgctcgcccgcgaaggtgcgcaagtgttagttatcgagcgtggcaattccgcaggtgccaagaacgtcaccggcgggcgtctctatgcccacagtctggaacacattattcctggtttcgccgactccgcccccgtagaacgcctgatcacccatgaaaaactcgcgtttatgacggaaaagagtgcgatgactatggactactgcaatggtgacgaaaccagcccatcccagcgttcttactccgttttgcgcagtaaatttgatgcctggctgatggagcaggccgaagaagcgggcgcgcagttaattaccgggatccgcgtcgataacctcgtacagcgcgatggcaaagtcgtcggtgtagaagccgatggcgatgtgattgaagcgaaaacggtgatccttgctgatggggtgaactccatccttgccgaaaaattggggatggcaaaacgcgtcaaaccgacggatgtggcggttggcgtgaaggaactgatcgagttaccgaagagcgttattgaagaccgttttcagttgcagggtaatcagggggcggcttgcctgtttgcgggaagtcccaccgatggcctgatgggcggcggcttcctttataccaatgaaaacaccctgagcctggggctggtttgtggtttgcatcatctgcatgacgcgaaaaaaagcgtgccgcaaatgctggaagatttcaaacagcatccggccgttgcaccgctgatcgcgggcggcaagctggtggaatattccgctcacgtagtgccggaagcaggcatcaacatgctgccggagttggttggtgacggcgtattgattgccggtgatgccgccggaatgtgtatgaacctcggttttaccattcgcggtatggatctggcgattgccgccggggaagccgcagcaaaaaccgtgcttagtgcgatgaaaagcgacgatttcagtaagcaaaaactggcggaatatcgtcagcatcttgagagtggtccgctgcgcgatatgcgtatgtaccagaaactaccggcgttccttgataacccacgcatgtttagcggctacccggagctggcggtgggtgtggcgcgtgacctgttcaccattgatggcagcgcgccggaactgatgcgcaagaaaatcctccgccacggcaagaaagtgggcttcatcaatctaatcaaggatggcatgaaaggagtgaccgttttatgacttctcccgtcaatgtggacgtcaaactgggcgtcaataaattcaatgtcgatgaagagcatccgcacattgttgtgaaggccgatgctgataaacaggcgctggagctgctggtgaaagcgtgccccgcaggtctgtacaagaagcaggatgacggcagtgtgcgcttcgattacgccggatgtctggagtgcggcacctgtcgcattctggggctggggagcgcgctggaacagtgggaatacccgcgcggcacctttggtgtggagttccgttacggctgatgttggtttgatacgtaacgccgcactgactctcattgcaaaaaacaggaataaccatgcaaccgtccagaaactttgacgatctcaaattctcctctattcaccgccgcattttgctgtggggaagcggtggtccgtttctggatggttatgtactggtaatgattggcgtggcgctggagcaactgacgccggcgctgaaactggacgctgactggattggcttgctgggcgcgggaacgctcgccgggctgttcgttggcacaagcctgtttggttatatttccgataaagtcggacggcgcaaaatgttcctcattgatatcatcgccatcggcgtgataagcgtggcgacgatgtttgttagttcccccgtcgaactgttggtgatgcgggtacttatcggcattgtcatcggtgcagattatcccatcgccaccagtatgatcaccgagttctccagtacccgtcagcgggcgttttccatcagctttattgccgcgatgtggtatgtcggcgcgacctgtgccgatctggtcggctactggctttatgatgtggaaggcggctggcgctggatgctgggtagcgcggcgatcccctgtttgttgattttgattggtcgattcgaactgcctgaatctccccgctggttattacgcaaagggcgagtaaaagagtgcgaagagatgatgatcaaactgtttggcgaaccggtggctttcgatgaagagcagccgcagcaaacccgttttcgcgatctgtttaatcgccgccattttccttttgttctgtttgttgccgccatctggacctgccaggtgatcccaatgttcgccatttacacctttggcccgcaaatcgttggtttgttgggattgggggttggcaaaaacgcggcactagggaatgtggtgattagcctgttctttatgctcggctgtattccgccgatgctgtggttaaacactgccggacggcgtccattgttgattggcagctttgccatgatgacgctggcgctggcggttttggggctaatcccggatatggggatctggctggtagtgatggcctttgcggtgtatgcctttttctctggcgggccgggtaatttgcagtggctctatcctaatgaactcttcccgacagatatccgcgcctctgccgtgggcgtgattatgtccttaagtcgtattggcaccattgttagcacctgggcactaccgatctttatcaataattacggtatcagtaacacgatgctaatgggggcgggtatcagcctgtttggcttgttgatttccgtagcgtttgccccggagactcgagggatgagtctggcgcagaccagcaatatgacgatccgcgggcagagaatggggtaaattgttcagatttctctcttttctgaatcaatattattgactataagccgcgtgaatatatgactacactttgtgggaaaacaaaggcgtaatcacgcgggctacctatgattcttataatttatgcgcatccgtatccgcatcattcccatgcgaataaacggatgcttgaacaggcaaggacgctggaaggcgtcgaaattcgctctctttatcaactctatcctgacttcaatatcgatattgccgccgagcaggaggcgctgtctcgcgccgatctgatcgtctggcagcatccgatgcagtggtacagcattcctccgctcctcaaactttggatcgataaagttttctcccacggctgggcttacggtcatggcggcacggcgctgcatggcaaacatttgctgtgggcggtgacgaccggcggcggggaaagccattttgaaattggtgcgcatccgggctttgatgtgctgagccagccgctacaggcgacggcaatctactgcgggctgaactggctgccaccgtttgccatgcactgcacctttatttgtgacgacgaaaccctcgaagggcaggcgcgtcactataagcaacgtctgctggaatggcaggaggcccatcatggataattaaggaatggcaggaggcccatcatggatagccatacgctgattcaggcgctgatttatctcggtagcgcagcgctgattgtacccattgcggtacgtcttggtctgggaagcgtacttggctacctgatcgccggctgcattattggcccgtgggggctgcgactggtgaccgatgccgaatctattctgcactttgccgagattggggtggtgctgatgctgtttattatcggcctcgaactcgatccacaaaggctgtggaagctgcgtgcggcagtgttcggctgtggcgcattgcagatggtgatttgcggcggcctgctggggctgttctgcatgttacttgggctgcgctggcaggtcgcggaattgatcggcatgacgctggcgctctcctctacggcgattgccatgcaggcgatgaatgaacgcaatctgatggtgacgcaaatgggtcgcagtgcctttgcggtgctgctgttccaggatatcgcggcgatcccgctggtggcgatgattccgctactggcaacgagcagtgccagcacgacgatgggcgcatttgctctcagcgcgttaaaagtggcgggtgcgctggtgctggtggtattgctggggcgctatgtcacgcgtccggcgctgcgttttgtagcccgctctggcttgcgggaagtgtttagtgccgtggcgttattcctcgtgtttggctttggtttgctgctggaagaggtcggcttgagcatggcgatgggcgcgtttctggcgggcgtactgctggcaagcagcgaataccgtcatgcgctggagagcgatatcgaaccatttaaaggtttgctgttggggctgtttttcatcggtgttggcatgagcatagactttggcacgctgcttgaaaacccattgcgcattgtcattttgctgctcggtttcctcatcatcaaaatcgccatgctgtggctgattgcccgaccgttgcaagtgccaaataaacagcgtcgttggtttgcggtgttgttagggcagggcagtgagtttgcctttgtggtatttggcgcggcgcagatggcgaatgtgctggagccggagtgggcgaaaagcctgaccctggcggtggcgctgagcatggcagcaacgccgattctgctggtgatcctcaatcgccttgagcaatcttctactgaggaagcgcgtgaagccgatgagatcgacgaagaacagccgcgcgtgattatcgccggattcggtcgttttgggcagattaccggacgtttactgctctccagcggggtgaaaatggtggtactcgatcacgatccggaccatatcgaaaccttgcgtaaatttggtatgaaagtgttttatggcgatgccacgcggatggatttactggaatctgccggagcggcgaaagcggaagtgctgattaacgccatcgacgatccgcaaaccaacctgcaactgacagagatggtgaaagaacatttcccgcatttgcagattattgcccgcgcccgcgatgtcgaccactacattcgtttgcgtcaggcaggcgttgaaaagccggagcgtgaaaccttcgaaggtgcgctgaaaaccgggcgtctggcactggaaagtttaggtctggggccgtatgaagcgcgagaacgtgccgatgtgttccgccgctttaatattcagatggtggaagagatggcaatggttgagaacgacaccaaagcccgcgcggcggtctataaacgcaccagcgcgatgttaagtgagatcattaccgaggaccgcgaacatctgagtttaattcaacgacatggctggcagggaaccgaagaaggtaaacataccggcaacatggcggatgaaccggaaacgaaacccagttcctaataaagagtgacgtaaatcacactttacagctaactgtttgtttttgtttcattgtaatgcggcgagtccagggagagagcgtggactcgccagcagaatataaaattttcctcaacatcatcctcgcaccagtcgacgacggtttacgctttacgtatagtggcgacaattttttttatcgggaaatctcaatgatcagtctgattgcggcgttagcggtagatcgcgttatcggcatggaaaacgccatgccgtggaacctgcctgccgatctcgcctggtttaaacgcaacaccttaaataaacccgtgattatgggccgccatacctgggaaagtatcggtcgtccgttgccaggacgcaaaaatattatcctcagcagtcaaccgggtacggacgatcgcgtaacgtgggtgaagagcgtggatgaagccatcgcggcgtgtggtgacgtaccagaaatcatggtgattggcggcggtcgcgtttatgaacagttcttgccaaaagcgcaaaaactgtatctgacgcatatcgacgcagaagtggaaggcgacacccatttcccggattacgagccggatgactgggaaagcgtattcagcgaattccacgatgctgatgcgcagaactctcacagctattgctttgagattctggagcggcggtaattttgtatagaatttacggctagcgccggatgcgacgccggtcgcgtcttatccggccttcctatatcaggctgtgtttaagacgccgccgcttcgcccaaatccttatgccggttgctcggctggacaaaatactgtttatcttcccagcgcaggcaggttaatgtaccaccccagcagcagccggtatccagcgcgtatataccttccggcgtacctttgccctccaggcttgcccagtgaccaaaggcgatgctgtattcttcagcgacagggccaggaatcgcaaaccacggtttcagtggggcaggggcctcttccgggctttctttgctgtacatatccagttgaccgttcgggaagcaaaaacgcatacgggtaaaagcgttggtgataaaacgcagtcttcccagcccccgcaattccggactccagttatttggcatatcgccgtacatggcatcaagaaagaagggataggagtcactgcttagcaccgcttctacatcgcgtgcgcactctttggcggtctgcagatcccactgcggcgtgatccctgcgtgggccatcaccagctttttctcttcgtcgatttgcagcagaggctggcgccgcagccagttaagcagctcgtcggcatccggcgcttccagcagcggtgtcaggcgatctttcggtttattgcggctgatcccggcaaataccgccagcagatgcagatcgtgattgcccagcaccagacgtacgctgtcgcctaaggatttcacatagcgcagaacatccaggctacccggcccgcgcgcgaccagatcgcccgtcagccagagggtatctttcccaggggtaaattctactttatgcagcaatgcgatcagttcatcgtaacaaccatgaacgtcgccaataaggtatgtcgccatattcttttaatgaatgagtgtgggaacggcgagtcggaatacgggaatgtcgatgctgaaagggacgccattttcatcgatcatttcgtagtgaccctgcatggtgcccagcggggtttcaatgattgcaccgctggtgtactggtactcttcgccaggcgcgataagtggctggacgccaaccactccttcgccctggacttcggtttcacggccattgccattggtgatcagccagtaacgccccaacaactgcactggcgctcgccccagattgcgtatggttacggtataagcaaaaacgtaacgttcattatcaggactagattgagcctcaatgtagacgctttgaacctgaatacacactcgggggctattgatcatcgttaactctcctgcaaaggcgcgttctccgccagatagttcgccatctggcaatattgcgcgacagagatattttccgctcgcatcgccgggtcgatccccattcccgttaacacctcgacgctaaacaggttgccgaggctgttacgaatggttttacgacgctggttaaaggcttcggtggtgatgcggctcaacacacgaacatctttaaccgggtgaggcatcgttgcatgaggaaccaggcgcacgacggcggaatccactttgggtggtggtgtaaaggcactcggcggtacttccagtaccgggatcacattgcaatagtattgcgccatgacgcttaatcgaccatacgctttgctgttcggtcctgcaaccagacgattcaccacctctttttgcaacataaagtgcatgtcggcaatggcatcagtatagctaaacagatggaacatcaacggcgtggagatgttataaggcaggttgccgaaaacacgcagcggctgacccattttctcggccagttcaccaaagttaaaggtcatcgcatcctgctgataaatcgtcagtttcgggcctaagaatggatgcgtttgcagacgtgccgccagatcgcggtcaagttcgatgaccgtcagctggtccagacgttcgccgaccggttcggtcaatgccgccagaccggggccgatttcgaccatcgcctggcccttttgcgggttaatggcagacacaatactgtcgatcacgaactgatcgttgagaaagttttgcccgaagcgtttacgggctaagtggccctggtggactcgattattcattgggtgttaacaatcattttgatggcgagattaagcgccgtaataaaactgccggcatcggctttgccacgtcccgccagttcaagcgcggtgccgtggtccacacttgtgcgaataaagggcaggcccagcgtaatgttcacaccgcgcccgaagccctggtattttagcacgggaagaccctgatcgtggtacatcgccagcacggcgtcggcgttatcaagatatttcggctgaaacagggtatcggcaggcagcggcccgttgagtttcatcccctgcgcccgcagctcattgagcaccggaataatggtgtctatctcttccgtacccatatgaccgccttcgcccgcgtgcggattcagcccgcagaccagaatgcgcggttcggcaataccaaatttggtccgcaaatcgtgatgcaaaatagcaatcacttcgtgcaaaagtgcaggggtgatagcgtctgcgatatcgcgcagcggtaaatgcgtcgttgccagcgccacgcgaagttcttcggtcgccagcatcatcaccacctttttcgcctggctacgctcttcgaaaaactcggtatgaccggtaaaaggaatgccagcgtcgttaataacgcctttatgcaccggacctgtgatcagcgcggcaaattcgccgttcagacaaccatcgcacgctcgcgccagcgtttccaccacataatgcccattttcaaccgctaactgccccgcagtgacaggtgcacgtagcgcgacaggaagtagcgttaatgtgcccgcagtttgcggttgtgcaggggagttgggggaataagggcggagggtgagcggcaaaccgagcatcgctgcccggttggtaaggagagtggcatcggcacaaacaaccagttcgaccggccactcacgctgtgcaagctggacaactaagtccgggccaatcccggcgggctcgccgggagtgatcacaacacgttgggttttaaccattagttgctcaggattttaacgtaggcgctggcacgttgttcctgcatccagcttgctgcttcttcgctgaacttacggttcatcagcatgcggtatgcacgatctttctgcgcagcgtcggttttatcgacattacgggtatccagcagttcgattaaatgccagccgaaactagagtgaaccggtgcactcatttgacctttgttcaggcgagtcagggcgtcacggaaggccggatcgaaaatatctggtgtagcccagccgagatcgccgccctggttagcagagcctggatcctgagagaactctttcgctgcggcagcaaaagtcgttttaccactcttgatatcagcagcaatctgttccagtttcacacgggcctgttcgtcagtcatgatcgggctcggtttcagcagaatatggcgagcatgaacttcggtcacgctgatatttttgctttcgccgcgcaggtcgttaactttcagaatatggaagccaacgccggaacgaatcgggccaacaatgtcgcctttcttcgcggtgcttaatgcctgggcgaagatcccgggcaactcctgaatacggccccagcccatctggccgccgttcagcgcctgctggtcggcagaatgagcaatcgccagcttaccgaaatcagcgccgttacgcgcctgatcgacaatggcgcgcgcctggctttccgcttcgttcacctgatcagaggtcgggttttccggcagcgggatcaggatgtggctcaggttcagctcagtgctggcgtcgttttggttacccacctgctgcgccagggattcgacttcctgcggcaggatggtgatgcgacgacgcacctcgttgttacgcacttcagagataatcatctctttgcggatctggttacgataggtgttgtagttcagtccatcgtaagccagacggctgcgcatctgatccagcgtcatgttgttctgtttcgcgatgttagcaatcgcctgatccagctgctcatcggagattttcactcccattttctgccccatctgcaggatgatttgatccatgatcaaacgttccatgatttggtggcgcagcgtcgcgtcatcaggaagttgctgccttgcctgagcagcgttcagttttacgctctgcattaatccatcaacgtcgctttccagcacgacgccgttattgacgacggctgcgactttatcgactacctggggggcagcgaaactggtattcgcgatcatggcgataccgagaagcagcgttttccagttcttcatactttttccatttcaattaaccgcactgcggattacgtggtaaatcaacaaatcacaaagtgttttgatacggcagaatgttgctacgcagcatctcttgcgtacccagaccgtagttggagctcaggccgcgaagttcgatgttaaagccgattgcgttgtcatataccgcatgttgtttatcgttatcccaaccgttcagcttccgctcgtaaccgacgcgaattgcatagcagcaggagctgtattgcacacctaacatagagtcggcttgcttgttagcattggtgtcgtagtagtaggccccaacaatggaccaacgatcggcaattggccagctggcgacagcacctacctggctaataccattcttatattgctcagcagtggaatagtacttaggcagcgtagcctgaatatattccgggctggcgtaacggtaattcagctgtaccagacggtcttcatcccgacggtattcaatgctggagttactggtcgctacgttatccagacgtgtatcgtactgaatcccgccacgcaatccccaacgctcggagatacgccagtaagtatcgcctgcccacaccagactacccgttttgtcgtcattctcccatgttatgttgtcatcgccagtgcgagactccgtgaaatagtagatttgaccaacggaaatattaaaacgttcaacggcagcatcatcatatatgcgagatgtgacaccggtcgtcacctggttagcggaggcaatacggtcaagaccgccgtaagtccggtcccggaacaggccagagtagtcagattgcagcagagagctgtcgtagttatagatgtcgctctgatcgcgatacggcacgtacaaatactgcgcgcgcggttccagcgtttgggtataacccggagccagcatttccatatcgcgttcaaagaccattttgccgtcaactttgaattgcggcattacgcggttaacggattcgtccagcttggtcgtgtttctggagttataccagtcaagattggtttgctgataatgggttgccagcaacttcgcttcggtattgatgctgccccagttattagagagcggcaaattgatggtcggttccaggtgaacacgggttgcttcaggcatgtcgtctctggtgttaacaaagtgcactgcctggccgtaaatacgcgtatcaaacggaccaacatcattctggtagtaattaacgtctaactgcggctctgcgctgtagctactggtgttctgttcgctgaaaacctggaactgcttggtactaacggtggcattgaagttttgcaccgcatagccaacgctgaatttttgcgttgcgtagccgtcagtactggaaccgtacttgttatcgaaatcattgaagtagctaggatcgctgaccttggtgtagtcgacgttgaaacgccacacctgatccatgaccccggagtggttccagtagaataaccaacgacgactactgtcatcgttcgggtgttcatcttcatagactttatcactaggcagatagtccagttccatcaagccagcgcccgcctgggagaggtagcggaattcgttctcccacatgatgttgccacgacgatgcatataatgcggcgtgatggtggcatccatatttggcgcgatgttccagtaatatggcaggtagaactcaaagtagttggtggtggtgtacttggcgttcgggatcaagaaaccagagcgacgtttgtcacccaccggcaactgcaaataggggctataaaagatcggtaccggacccaccttaaagcgggcgttccagatctccgcaacttgttcttcgcggtcatgaataatttcgctacctaccacgctccaggtgtcagaacccggcagacaggaggtaaagctaccgttatccagaatggtatagcggttttcgccacgttgtttcatcaggtccgctttaccgcgaccctggcgacccaccatctggtaatcaccttcccagacgttggtatctttggtgttcagattcgcccagcctttcggccctttgaggatcacctggttatcgtcgtaatggacattaccgagcgcatcaacggtacgtaccggctccggttgtcctggtgcctctttttgatggagctgcacttcgtcggcctgcagacggctgttaccctgcatgatatccacgctgccagtaaacacggcgtcatccgggtagtcccctttcgcgtggtcagcattgatagtcacgggtaagtcattggtatcgccctgtaccagaggacggtcatagcttggcacgcccaacatgcactgactggcgaggtcggctgccagtccctgttgactataaagggcggtggcaatcatggtggccaggagagtggggatacgttttttcatacgttgattttattgttccatcatcggtaacgttgcgcgtgacaaacggtcagagactaacgtactcgtcatctctacgctagtgttaatcctgtccgaatagcgtcagtggtgttaggcacggcattgaatgacaggtatgataatgcaaattataggcgatgtcccacaattgaccgcagccggaaaacggtaaaagcacctttatattgtgggagatagccctgatatccgtgtgtcgatttggggaatatatgcagtattggggaaaaatcattggcgtggccgtggccttactgatgggcggcggcttttggggcgtagtgttaggcctgttaattggccatatgtttgataaagcccgtagccgtaaaatggcgtggttcgccaaccagcgtgagcgtcaggcgctgttttttgccaccacttttgaagtgatggggcatttaaccaaatccaaaggtcgcgtcacggaggctgatattcatatcgccagccagttgatggaccgaatgaatcttcatggcgcttcccgtactgcggcgcaaaatgcgttccgggtgggaaaaagtgacaattacccgctgcgcgaaaagatgcgccagtttcgcagtgtctgctttggtcgttttgacttaattcgtatgtttctggagatccagattcaggcggcgtttgctgatggtagtctgcacccgaatgaacgggcggtgctgtatgtcattgcagaagaattagggatctcccgcgctcagtttgaccagtttttgcgcatgatgcagggcggtgcacagtttggcggcggttatcagcagcaaactggcggtggtaactggcagcaagcgcagcgtggcccaacgctggaagatgcctgtaatgtgctgggcgtgaagccgacggatgatgcgaccaccatcaaacgtgcctaccgtaagctgatgagtgaacaccatcccgataagctggtggcgaaaggtttgccgcctgagatgatggagatggcgaagcagaaagcgcaggaaattcagcaggcatatgagctgataaagcagcagaaagggtttaaatgaccctgtaaatgatgctgagtaactgcccacgattaaaggtggccgccctggcggtcacttctttgagaaaaggcgtttactcagaatggtggacaggctcaatgcacgatttacgggaggggttctgtaggttttatcgcgttgaccctgcttaaggttgagagctttacgacgagcggaattatatttttacgtcttaaaaataaaaaacacatacctgaatgagcgatttttgaaagtatatttattcagaacgcgcatcatgagtttttaactcaatgcgaggctattaccatgaaagtaagtgttccaggcatgccggttacacttttaaatatgagcaagaacgatatttataagatggtgagcggggacaagatggacgtgaagatgaatatctttcaacgcttgtgggagacgttacgccatctgttctggagtgataaacagactgaggcttataaacttctgttcaatttcgtgaataaccagactggcaacatcaacgccagtgaatactttactggggctatcaacgagaatgagagagaaaagtttatcaatagcctggaattattcaataaacttaaaacatgcgcaaaaaatccggatgagttggtcgcaaagggcaatatgcgctgggtcgcccagaccttcggggatatcgagttaagtgtcactttttcattgaaaagaataagatatgtactcagacgttgcagctgcataagggccaaggtaacttgggcgttgatcttagaaaggcttaccttcccggcgttgacatgagggattgttaccttggtaaaaaaacaatgaaaggtagcaatgatatcctttatgagagacctgggtggaatgctaacctgggcgtgctaccccggacggtgctaccccggacggtgctaacccggacggtgctaacctggacggtgctaccgtgaacggtgctacctccttatatgatgaggtaattattattaataaaatcccccccaaaaaaattgatactaaaggagttgctactgaagaagttgctactaaaaaagtactgctgaacaaattactgacaacgcaattattgaatgagccagaataagctaaggttgaaggggctggaacgccccttcaaccttagcagtagcgtgggatgatttcacaattagaaagacctgcatgatgagctagagaagaggctagtgacgcaaggcgtcgtgcaggacacggatcaccgagatgggcatcgccaaccagactgctaattagcccatgaataacaatcagaaaggaccataacagacccgttaaaatgaaatataagagacggtcaacgggtgaagaaaaagttcaaaaattcgctgtggagcaggaagggaattaccgaatggaaagcgtagccacacgcaacaactgaaagcagtttggcagaaacaaaaaatccccggactcggggatttatgtacaagaggcagcccttaggatgagggtataaacgtacaggaaaggttaaaaatccgctggcgctttaaacgtcatactattgccatacgccggatgggtaatcgtcaacatctctgcatgtagcaacaaacgtggtgccatcgctctcgcttctggacttgcataaaaacgatcgccgagaatcggatgacccagcgccagcatatgcacacgcaattgatggctacgcccggtaatcggttttaacaccactcttgccgtgttatccgccgcatactccaccacttcatattccgtctgcgcaggtttacccgtttcgtaacagactttctgtttcgggcggtttggccagtcgcaaatcagcggcagatccaccagaccttctgcgggggatggatgcccccagacgcgggccacatactgctttttcggctcgcgctcgcggaactggcgttttaactcccgctccgcggctttggtcagcgccactacaatcacgccgctggtagccatatccagacgatgcacgctttctgcctgcggataatcacgctgaatgcgcgtcatcacgctgtctttgtgctcttccagacgacccggcacactcaacaaaccgctcggcttgttgaccaccataatatggtcatcctgatacaggataaccaaccagggttcctgcggtggattgtagttttccatccccattttcggctccgttactgatgcgttacaacgatcaaacgcagggcatccagacgccaacctgcctgatccaggctttccattacctgctgacggttgctctcaatggcggtcagttcgtcgtcacgaatgttcgggttcactgcacgcagagcttccagacgagacagctcggcagacagtttttcgtcggcttcgttacgcgctgcatcaatcaatgcacgggcagatttctcgatctgcgattcacccagttgaaggatagcgtgaacatcctgctgcacggcgttaaccagtttgctgccggtgtgacggttaaccgcgttaagctggcggttaaaggtttcaaactctacctgcgccgccaggttgttgccgtttttatccagcagcatacgtaccggcgtcggtggcaggaagcggttgagctgcaactgcttcggagcctgggcttcaaccacataaatcagttccaccaacagcgtacctaccggcaacgctttgttttttaacagactaatcgtgctgctaccggtatcgccagaaaggatcagatccagaccgttgcggatcagcggatgctcccaggtaataaactgtgcatcttcacgcgccagcgccacttcacgatcaaaggtgatggtgatgccatcttcgctcaggccagggaagtccggcaccagcatatgatcggacggcgtcagcacgatcatgttgtcgccgcgatcgtcctgattgataccgataatatcgaacaggttcatggcgaaggcgatcaggttggtatcgtcatcctgctcttcaatgctttctgccagtgcctgggctttttcgccaccgttggagtggatttccagcaggcggtcacgaccctgttccagctgtgctttcagcgtttcatgttgctcgcggcagtttttgatcagatcgtcaaagccttcggtttgatccggactagccagatagttaatcagatcgttgtatacgctatcgtaaatagtgcgtccggtcgggcaggtgtgctcaaatgcatccagaccttcgtgataccagcgcaccagcacgctctgagcggttttctccagataaggcacatggatctgaatatcgtgcgcctggccgatacgatccagacgaccaatacgctgctccagtagatccgggttgaatggcaggtcaaacatcaccatgtggctggcgaactggaagttacgtccttcagaaccgatttcactgcacagcagtacctgtgcgccggtgtcttcttcggcaaaccaggcggcagcgcggtcacgttcgataatgctcataccttcgtggaacaccgcagcgcgaataccttcacgttcgcgcagtacctgctccagttgcagcgcagtggcagctttggcgcagatcaccagcactttctgagagcgatggctggtcaggtagcccatcagccactcaacgcgcggatcgaagttccaccaggtggcgttatcaccttcaaattcctgataaatacgctccgggtagagcatatcgcgagcacgatcttccgcacttttacgtgcgcccataatgccggagactttaatagccgtctgatactgcgtcggtagcggcagcttaatggtgtgcagctcgcgtttcgggaatcctttcacaccgttacgcgtgttacggaacagcacgcggctggtgccgtggcgatccatcagcatgctaaccagctcctgacgggcgctctgggcatcttcgctgtcgctgtttgctgcctgcaacagcggctcgatatcctgctcgccgatcatctcgccgagcatgttcagttcgtcattgctcagtttgttacctgccagcagcatggcaacggcgtccgcaaccggacgataatttttctgctcttcaacgaactgcgcaaaatcgtggaaacggttcgggtccagcagacgcagacgggcgaagtggctttccatccccagctgttccggggtcgcggtcagcagcagaacgcccggcacgtgctctgccagttgttcaatggcctgatattcacggcttggcgcatcttcgctccacaccaggtgatgcgcttcatcgaccaccagcaggtcccattcggcttcacagagatgttccaggcgctgtttgctacgacgggcaaaatccaggctgcaaatcaccagctgttcggtgtcaaacgggttgtaagcatcgtgctgagcttcggcataacgctcatcatcaaatagcgcaaagcgcaggttgaaacggcgcagcatttctaccagccactgatgctgtaaggtttccgggacgataattagcacacgttcagcagcgccagagagcagttgctgatgcaggatcatcccggcttcaatggttttccctaaacccacttcgtcagccagcaggacgcgcggcgcgtggcggcgaccaacatcatgagcgatgttgagctgatgcgggatcaggctggtacgctgaccgcgcaggccgctgtacggcatacggaactgttcgctggaatatttacgcgcgcgataacgcagcgcaaagcggtccatacggtcaatctgcccggcaaacagacggtcctgcggtttgctgaacaccagtttgctatcaaggaaaacttcacgcagggctacgccggactcttcagtatccaggcgagtaccgatataggtcagcaagccattttcttcttttacttcttcgacttgcatctgccagccgtcatggctggtaatggtatcaccagggttgaacatcacgcgggtcacgggggaatcactgcgtgcgtacagacggttttcaccagtagatgggaaaagtaaagtgacagttcgcgcatccaccgcgacaacggttccaagtcccaattcgctttctgtatcgctgatccagcgttgaccaagtgtaaaaggcatatgtgttcggctctatatctttaattgcaggcaataaccacccgctaccgtgcttatgaggtagtggtgttattcaggtccaggaatggaaagggcgctatggtactggatggcaaagcattcgtcacgcatcaaaatggtatctggcgaactcttttttttgctcaaaatagcccaagttgcccggtcataagtgtagcaaaattatcctcaataaaagggagtattccctccgccacgggttgtagctggcgggtcagatagtgttcgtaatccagtggactacgttggtagtccagcggctccgggccgttggtggtccatacgtacttaatggtgccgcgattctgatattgcaaggggcgaccacgcttttggttttcttcatcggcaaggcgagcggcgcgtacatgaggcggcacattacgctgatactcgctcagcggacggcgaaggcgtttacggtaaaccagtcgcgcatccagttcacccgccatcagtttgtcgatggtttcgcgtacatattcctgatatggctcgttgcggaagatgcgcaggtatagctcctgctgaaactgctgggccagcggcgtccagtcggtgcgcacggtttccagccctttaaacaccatccgctgcttgtcgccctcctgaatcagtccggcataacgctttttactgccggtatcggctccgcgaatggttggcatcagaaaacggcagaaatgggtttcatactccagttctaatgcgctggtcagccgttgtttttgcagcgtttccgcccaccaggcgttaacgtgctgcaccagtgcacgaccgattttcgccgcttcttcttcgctatgtgcgcctttcagccagacaaacgtactgtcggtatcgccgtagataacgtcgtagccctgtgcttcaatcaacgctttggtttgccgcatgatctgatgaccacgcatggtgatgctgcttgccagccgcggatcgaagaagcggcaggcggtggtgccgagcacgccataaaaggcattcatgatgattttcagcgcctggctcagcggtttgttaccctggcgtttggcttcatcgcgcccgtgccagatgttagtcacaatctccggcaggcaatgtttttctcggctgaaccaggcatcgagaaaaccttcggtactgtgctctggatcaggctgcgccatgccttccaccagcccgacgggatcaatcagaaaggtgcggatgatgctcgggtacaggcttttatagtccagcaccagcacactatcataaagccctggccgactatccatcacgtagccgccagggctggcgtgcggcggcacttcgccgagattaggcgcgacataaccagcgcgatgcattcgcggaaaatagagatgaccaaatgccgccacgctaccgccgtgtcggtccaccggcaggccgttcaccgttgcccgttcgagtaaaaatggcatgatttcagttttgtggaagatctgcgtcaccagctcgcaatctttcaggttataagttgccagcgcaggtttatcttcggcgaaacggcggtcaatttcgtccattcgatcccacgggttatcgatagattttccttcgcctaatagctcctgagcgacagtttccaggctgaaactagagaaattccagaacgcggatttcagcgcctcgataccgtcgataattagccgacctttagcctgggcaaaaaagacgccgtttttaaagccgtgctcgcgccactccagctcgctattatcgcgcccaagacgcagcggaagacggtaacgctcggcatgtttttgcagcattcgcagatcgaactgcaccacgttccaaccgatgatcacatcaggatcgtagttggcaaaccaggcgttgagtttttccagcaactgcgggcggctggcgacgtattccagttcgaaatcaaggctggaggcgtcgccattctccggccccagcatataaacgatgcgctgcccgcagccttccaggccgatgcagtacagctcaccgtggcgggtggtttcaatatctatagaaacccacttgagcggcggacgatagtcgggatgcggtttcagacgggcattaacgatagtgccattgtgcatatcaccctcgacccacaccggactggtgataaaccgctccatcagatagcgttctggcggacgcacatcggcctcgtagacggtaacgccaccttcacgcaggcgcttttcgtaattcatcaattggcgatgggcgcgacagtaaaggccatacaccggctggcggtgaaaatcctttaacgccagcggtgtcaggcgaaagccttgttcaccctgcaaaatatgctgagcgcggggaacctgatcggcgggaataaacgccacggactcttgcggtgcaagcgtaacctgcaacggcccgttgtccgtcgccagccagaaggagacttctgtcccttgcggggtgtcccgccagtgtcgggttaagataaaacctgcctgcgccacgctgaaaatccatcaaaaaaccaggcttgagtatagcctggtttcgtttgattggctgtggttttatacagtcattactgcccgtaatatgccttcgcgccatgcttacgcagatagtgtttatccagcagcgtttgctgcatatccggtaactgcggcgctaactgacggcagaatatccccatataagcgacctcttccagcacgatggcgttatgcaccgcatcttcggcatttttgccccatgcaaacgggccgtgggaatggaccagaacgccgggcatttgcgctgcatcgataccctgtttttcaaaggtttctacgatgacgttaccggtttcccactcatattcgccgttgatttctgcgtcggtcattttgcgggtgcagggaatggtgccgtagaaatagtcggcgtgggtggtgccggttgctggaatgctctgacccgcctgcgcccagatggtggcgtggcggctgtgcgtatgcacaatgccgccaatggaggggaatgcctgatagagcagccggtgagttggcgtgtcggaggagggctttttcgtaccttcaaccacttcaccggtttcgatgctaaccacgaccatatcgtcagcggtcatgacgctgtaatcgacgccggaaggtttgatcacaaagacgccgcgctcgcgatcaacggcgctgacgttgccccatgtgagcgtgaccaggttgtgttttggcagcgccaggttggcttctaatacctggcgtttgagatcttctaacatgttgactccttcgtgccggatgcgctttgcttatccggcctacaaaatcgcagcgtgtaggcctgataagacgcgccagcgtcgcatcaggcgttgaatgccggatgcgctttgcttatccggcctacaaaatcgcagcgcgtaggcctgataagacgcgccagcgtcgcatcaggcgttgaatgccggatgcgctttgcttatccggcctacaaaatcgcagcgtgtaggccagataagacgcgtcagcgtcgcatcaggcgttacataccggatgcggctacttagcgacgaaacccgtaatacacttcgttccagcgcagcgcgtctttaaacgctggcaggcgtgtgtcgttatcaatcaccgtgatttcaatgtcgtgcatctcggcgaattggcgcatatcgttgaggttcagtgcatggctgaagacggtatggtgcgcgccaccagcgaggatccacgcttcggaagcagttggcagatccggttgcgctttccacagcgcattcgccaccggcagtttcggcagggagtgcggtgttttcaccgtgtcgatgcagttaaccagtagacggtaacgatcgccgagatcaatcaagctggcgacaatcgctgggccggtttgggtattgaagatcaggcgggcaggatcgtccttaccaccaataccgagatgctgaacgtcgaggatcggtttctcttctgcggcgatgctcgggcagacttccagcatatgggagccgagcaccaggtcattacctttctcgaagtgataggtgtagtcctccataaaggaggtgccgccctgcagaccggtactcatcaccttcatgatgcgaagcagggcggcagttttccagtcgccttcgcccgcaaagccgtaaccctgctgcatcagacgctgtacggccagaccaggaagctgtttcagaccgtgcaaatcttcaaaggtggtggtgaacgcgtggaagccaccttgttccaggaaacgcttcatccccagctcaatacgcgccgcttccagcacgttctgtcgttttttgccgtggatttgtgtggcaggcgtcatggtgtagcagctttcgtactcatcgaccagcgcgttaacatcgccgtcgctgatggagttcaccacctgcaccagatcgccaaccgcccaggtattgacggagaaaccgaacttgatctgtgcggcaactttatcgccatcggtgaccgccacttcacgcatgttatcgccaaatcggcagactttcagatgacgggtatcctgtttagagaccgcctgacgcatccaggagccgatacgctcatgggcttgtttatcctgccagtgaccggtaaccacggcatgttgctgacgcatacgcgcgccaatgaagccgaactcgcgaccgccatgtgcagtctggttcaggttcataaagtccatatcgatactgtcccacggcagcgccgcgttgaactgggtgtggaattgcagcaacggtttgttgagcatggtcaggccgttgatccacattttggccggggagaaggtgtgcagccacaccaccagaccagcgcaacgatcgtcgtaattcgcgtcgcggcaaatagcggtgatttcatccggcgtggtgcccagcggtttcaacaccagtttgcagggcagtttcgcttccgtattcagcgcattaacgacgtgctcggcatgttgggtgacctgacgcagggtttccgggccatacagatgctggctgccaatgacaaaccacacttcataattatcaaaaatcgtcattatcgtgtccttatagagtcgcaacggcctgggcagcctgtgccggggcggaagttggaagatagtgttgttcggcgctcatcgcccattgctgatagcggcgataaagctgttcaaagcgttgtgcctgctcgctgcacggttgcagggttttctctaccgcactggccattttttgctgagcacttgggatgtctgcgtgcactttcgcggcgacggcagcaaaaatcgccgcaccgagcgcacagcactggtcagaggcaacaatttgcagcgggcgattcagcacgtcgcagcaggcctgcataatgacctggtttttccgcgcgatgccgcccagtgccatcacgttattaacggcgatcccctgatcggtaaagcactccatgattgcgcgtgcgccaaaggcggtggcagcaatcaaaccgccgaacagcagcggagcgtcggtagcgaggttaagatcggtaatcacccctttcaggcgttggttagcgttcggtgtgcggcggccgttaaaccagtcgagcaccaccggcaggtgatccagagacggatttttggcccatgcttcggtcagcgccggaagcagttgtttctggctggcgttgatttgcgttttcagttccggatgctgggcggcaagctgttccagcggccagccgagtacgcgaccaaaccaggcgtagatatcaccaaacgcgctttggcctgcttccagaccgataaatccaggcaccacgctgccatcaacctgaccgcaaatacctttaactgcccgctcgccaacgctctgtttgtcggcaatcggaatgtcgcaggtggaagtaccgataacttttaccagtgcgttaggctgtgcgcctgcgccaactgcgcccatatggcagtcaaacgcgccgccggaaatcaccacgctttcaggcaggccgagacgctgcgcccattccgggcataaggtgcccaccggaatatcggcagtccaagtgtcagtgaacagcggggaaggcaaatggcgattgaggatcgggtccagctcatcaaagaaactggctggcggcaggccgccccagctttcgtgccacagagatttatgcccggcgctgcaacgtccgcgacgaatatcctgcgggcgggtggtaccggaaagcagagctggcacccagtcgcacagctcaatccagcttgcggcagattgcgccacggcgctgtcctggcgagtcacatgcaggatttttgcccagaaccattcgctggaataaataccaccaatgtagcgggagtagtcaacgttgcccggcgcgtggcacaaacgggtaatctcttccgcttcttcaaccgcagtgtggtctttccacaatacgaacatcgcgttcgggttttcggcaaactccgggcgcagcgccagcacgtttccgtcggcatcaatcggtgcgggcgtgctgccggtactgtcaacgccaatcccgaccacagctgcgcgctgttcgacgctaagctctgcaagcacggttttcagtgccgcttccatactctcaatgtagtcacgcggatgatgacggaactggttattcggggcatcacaaaattgccctttctgccaacggggataccactctacgctggtggcgatctcttcaccggtagcgcagtccaccgccaaagctcgcacagaatcactgccaaaatcgaggccaattgcaatcgccatcgtttcactccatccaaaaaaacgggtatggagaaacagtagagagttgcgataaaaagcgtcaggtaggatccgctaatcttatggataaaaatgctatggcatagcaaagtgtgacgccgtgcaaataatcaatgtggacttttctgccgtgattatagacacttttgttacgcgtttttgtcatggctttggtcccgctttgttacagaatgcttttaataagcggggttaccggttgggttagcgagaagagccagtaaaagacgcagtgacggcaatgtctgatgcaatatggacaattggtttcttctctgaatggtgggagtatgaaaagtatggctgaagcgcaaaatgatcccctgctgccgggatacagctttaacgcccatctggtggcgggtttaacgccgattgaggccaacggttatctcgatttttttatcgaccgaccgctgggaatgaaaggttatattctcaatctcaccattcgcggtcagggggtggtgaaaaatcagggacgagaatttgtctgccgaccgggtgatattttgctgttcccgccaggagagattcatcactacggtcgtcatccggaggctcgcgaatggtatcaccagtgggtttactttcgtccgcgcgcctactggcatgaatggcttaactggccgagtatatttgccaatacgggtttctttcgcccggatgaagcgcaccagccgcatttcagcgacctgtttgggcaaatcattaacgccgggcaaggggaagggcgctatagcgagctgctggcgataaatctgcttgagcaattgttactgcggcgcatggaagcgattaacgagagcctccatccaccgatggataatcgggtacgcgaggcttgtcagtacatcagcgatcacctggcagacagcaattttgatatcgccagcgtcgcacagcatgtttgcttgagcccgagccgtctgagtcatcttttccgccagcagttagggattagcgtcttaagctggcgcgaggaccaacgcattagtcaggcgaagctgcttttgagcactacccggatgcctatcgccaccgtcggtcgcaatgttggttttgacgatcaactctatttcagccgagtatttaaaaaatgcaccggggccagcccgagcgagtttcgtgccggttgtgaagaaaaagtgaatgatgtagccgtcaagttgagttaattggtaacgaatcagacaattgacggcttgacggagtagcatagggtttgcagaatccctgcttcgtccatttgacaggcacattatgcaagcattgctggaacactttattacccaatccaccgtgtatagtttgatggcggtggtgttggtggcctttctggagagcctggcgctggtcggtttgattctacccggtacggtgctgatggcggggctgggagcgctgattggcagcggcgagttaagtttctggcacgcctggctggcagggattattggctgcttgatgggcgactggatttctttctggctgggttggcgttttaaaaagccgttgcatcgctggagttttctgaagaaaaacaaagcactacttgataaaactgaacatgcgttgcatcaacacagcatgttcaccattctggtcggtcgttttgttggcccgacgcgtccgctggtgccaatggtggcgggaatgctggatctgccggtggctaaatttattacgccgaatattatcggctgcctgctgtggccgccgttttacttcctgccagggattctggcgggcgcggcgatcgatattcctgccggaatgcagagcggtgagtttaaatggttgctgctggcaacagcggtgtttttgtgggttggtggctggctgtgctggcggttatggcgcagcggtaaagcgactgaccgtttgagtcattatttgtcccgcggtcgtttgttgtggctgacgccgttgatttctgccatcggcgtggtggcgctggtggtgttaattcgccacccgttgatgccggtgtatatcgatattttgcgtaaagtggttggggtttaagagatagtcttgtgcgggttgcctgatgcgacgcttgccgcgtcttatcaggcctacaaaacgcactacccgtaggtcggataaggcgttcacgccgcatccgacagtgcatattaacccgtaatccccaatagtgcgctagcactcgccttaccgctcaacaactcattggtcataccctgccaggcgatgcgcccgtcggcgactactacgctgcgcgtggcgatccgcgccgcatcttccacgctgtggctcaccatcaatagcgtcattttttgctgctggcagctcgtgctcaccagcgtcaacatctcctgacgtaacgccggatcgagcgcagagaacggttcatcgagcaataaaatcggctgttcgcgtaccagacaacgcgctaacgccactcgctgtcgctgaccgccggaaagctcgcccggtaaccgcgccattaaattatcaatccccatctggcgggcgatagcgtgcattttcccctgctgtaccgcgttcagtttcaatcccggatttagccccagcccgatgttctgtgcgaccgtcaggtggctgaacaggttgttctcctgaaacagcatgctcaccggacggcgactcggcggcatagttgtgtgatctacgccatcgatagtcaggctaccgctggctggcgtcagaaaaccggcgatcaaattcagcagggtacttttacccgcgccgcttggcccgaggatcgccacctgctcgccgcgttccaccgttaagctaaaacgcatcggcaaatggtggtaaagccaggtgatatcagtcagttttaacatttcgccccggtagtttttcaatcacggtaaacagcagaaaacagagcagcagcagaattaacgcggtgaccgcaccgtcctggctgcgataggagccaatttgctggtagagataaaacggcagggtgcggaaatcatcgttaccgaacaacgccaccacgccaaaatcaccaatgctcagcacgcatgcaaaggccagcgcctgcgccagtggacgtttcagggcgcgcagctccaccacttttaagcgactccagccttcaatccccaggctctgacataacatgctgtagcgggcggtgatatcgcgcatcgggttttccagcactttcagcgcataagggatcgccattaacgcattggtgaaaatcacaatgccgtcagcagattgtggcaggccgatagtgttgttgagcagtaaaaagaagccggtagccagcacaatccccggcatggcgaggatcaacatgccgctcatctccagcacctgacccgccagcattttctgccgcgcccgcagttcgcgactgctccatagcagcatcatggtcagcactacgcacaatacacctgccgccagcgcaatacgcaagctggtccacagcgcctgccacagcaccggttgtgccagcacttccggcaactggcgatttaccccatcgacgatcaccgccagtaacggtggcagcaacagcagcagcgccagcacaattaacaccgtgtcgcaaatgcggctatgcagacgatcgtccgggtcgcgccagccttgcagcagcgtggtgccgggcgcaatggccttactcaatcgctgactcaacagcaccagcccgaggcagcacaccatctggagcagcgccagcattgccgcgcgggcaggatcgtagtcgtaactcagcgcctgatagattgccagctcgatagtggtcgcctgcggaccgccccccaggcttagcacggtggcgaagctggcgaaacagagcataaagataagcgcagcaaccggcgggatttgtcgccgtaaccacggccattcgacgaagcggaaaaaatgccagctacgcatcccaagctgggcggcaagttgacgctgttcgccggggatgttttccagtgcctggagtaataagcggctcgccatcggcagattaaaaaacacatgggccagcaaaataccttgcaggccgtaggggctaaaggtccactccagaccgaggctttggcagagtgttgccagccagccctggcgaccatagacgctaagaatgccgaaaacagcgaccaacaccgggaggatcaaggtcattgcacacagacgcaacagcgccagccgacccggaaagcgcctgcgatagagcgcgcgggcgaggaatatcgcgggtatgacagagagcagtgcgctgagaaacgcctgccagaaggagaagcgcaccacatgccacagatagctgtcctgccagactgccacccagtcatcctgcggcgcgttccaccacagggcgagaaacgccgccagcgcaaccgctaccaccagcgtggtggcgcttacacctggaattaaccagccgggaattaacggctgacggcgcgttgccattcgctaatccatgcctgacgttgtgccgccacttcggctggcgtgaactccaacgtggttgcgggtttggtcaatttttcaaaaccggcaggcagcgtgacgtttgccaccggatacatccagttgccggttgggatcgcattctggaaagccggagaaaccataaactggaggaatttttgcgccagctccggctgcttgctggcagcggtgcgggcggcgacttccacttgcagatagtgaccttcgctgaagttcgcggcggcgtagttatctttcttctcttcgagaatgtgataagccggagaggtggtgtaactcagtaccagatcgctttcaccttttaaaaacaggccgtaggcttcgctccagcctttggtgaccgtgaccgttttcttcgccagtttctgccaggcttgtggggcgtcatcgccatagactttttgcatccatagcaacagacccagccccggtgtactggtgcgcggatcctgataaatcacccgccagttttgatcgctctcaaccagttctttcaggctttgtggcgggtttttcagtttgttcttgtcataaacgaaggcgaagtagccataatcaaacggtacgaaagtgtcattattccagccgccgggaacgttaacggcatccgctgccacaccgcttttggcaaacagtccggttttactggcggcgtctaacaggttgttatccagccccagcaccacatcggctttactgtttttgccttccatccgtagacggttgagaaggctaacgccatcttccagcgccaccagtttcagttcgcaattacagtcggcttcaaaggcttttttaaccaccggaccaggcccccagtcggcggcgaaggaatcgtaggtataaacagtcagaacgggtttagcgaaaacgggcgctgtgcacagcaacagcaggggcagacatttttttaacactttgcacctcaaaaaagagtggcaaaggacttgagaaggagcctcaaatcccttcgccggcgttatccggatcaggttcgacgggtattttctcagcgcacgcgtacgcgtggcaccccgttgagaacggcgttagtgtagtgattttgttatcaaccagcaatcatggatccggtggcgcaaaccacgcacttttaaaatcgaaccagccgagggtattcatgcgcaggccgcgcatactgcgttgcccctgaatgatcagccagtggtgcaataatggcaccatcgctttgctggcgaccagttgctggcaccagttcgccagattcatctcgccattgcgccagcgagcagcgtcggcttgccagtcaatgggaatgcaatgttgtagcagtggcacttcgcataaatgtgcgaaaacagagaagtccagcggcagggtaaagttggcgctgtttagccagatatcactttcgatctctcctgtatgccactgatcgtagtcgatctctttgattttcagcgtgacctggtgacttgccagaatctgctgcatgatcccggcaatcacccgatgctcactgtgatcctgataaaaggttagggtgaggctttccaggccagccggtttttcgctctttatggtgcgggcatggtgccaacgggggagcagtccataagccgggaaccacagttgctggtactgttcctcagcgaaatagaccagattagttggagaaagcacatagcttacccagtccctgacttgctgattcgccccgcgatgggtgcggctgtcgaacagtaaatagtagcaaccttcctccaggcggctttcaatctctttttcctcgccctgtggaccttttagcatcagccctccggctggctcgtcggcaatttccggcagaacccagacgttaacttcgtcgattaatgcccggtaaccgaagaagtcatcgaatgcctgaattttcagttgattggtgctgttgcgaatcaccgcatacggaccggtgccgatgggatggctggcaaagttactgagggtttcccattcgcgcggcaggatcatcgccggaacttgccccagcagtaacggtaaccagcggtccggttgcgtgagatggatatccagcgtccagggcgtcgggctcacaatgtcagcaatatggctatagagcggcagcgtattgattcgttttaaagaggcgatcacatcgtccatttccagttcacgaccatggtgaaaatggactcctggacgcaaaaagaaacgccagtgaagcggactaatttgctgccagtggtgggcgatgtctgcttccagttccccattttcctcatttatgcgcgttaggctactgaagatttgccgggcgatatgggtttcggaacggcgcaatgcgctgccaggtagcagattacgcaacggacgatagtagagcacgcgcaggatgtgccgcccctggcggaagctgcggcccagatgagaaaccagcatttgccgcacagtcgctttgtcgccaaccaactgcaccagttgatcgatacgatcctgctccagcaggtcttccgcccgctgttgctgaagcgccagcccggtatagaggaatgtcagacggctgcgtttaccgcgcccgacttccgcttcccacgtcagccagccgcgatcctgcatggtgttgagcagggtgcgcatatgacgacggctgcagctcaataacgctgccagttcgttgagcgttgtgtcctggcttttaccctcgcagcattgccacaggcggatgaactgttgttgcagacgagcagatggcataaaaggggaactcctgtgcaaaagacagcaattttattttccctatattaagtcaataattcctaacgatgaagcaagggggtgccccatgcgtcagttttatcagcactattttaccgcgacagcgaagttgtgctggttgcgttggttaagcgtcccacaacgattaaccatgcttgaaggactgatgcagtgggatgaccgcaattctgaaagttgacttgcctgcatcatgtgtgactgagtattggtgtaaaatcacccgccagcagattatacctgctggttttttttattctcgccgcgctaaaaagggaacgtatgatctggataatgacgatggctcgccgtatgaacggtgtttacgcggcatttatgctggtcgcttttatgatgggggtggccggggcgctacaggctcctacattgagcttatttctgagtcgtgaggttggcgcgcaacctttctggatcggcctcttttatacggtgaatgctattgctgggatcggcgtaagcctctggttggcaaaacgttctgacagtcagggcgatcggcgaaaactgattatattttgctgtttgatggctatcggcaatgcgctattgtttgcatttaatcgtcattatctgacgcttatcacctgtggtgtgcttctggcatctctggccaatacggcaatgccacagttatttgctctggcgcgggaatatgcggataacagcgcgcgagaagtggtgatgtttagcagcgtgatgcgtgcgcagctttctctggcatgggttatcggtccaccgttggcctttatgctggcgttgaattacggctttacggtgatgtttagcattgccgccgggatattcacactcagtctggtattgattgcatttatgcttccgtctgtggcgcgggtagaactgccgagcgaaaatgctttaagtatgcaaggtggctggcaggatagtaacgtacggatgttatttgtcgccagcacgttaatgcggacctgcaacaccatgtacattattgatatgccgttgtggatcagtagcgagttaggattgccagacaaactggcgggtttcctgatggggacggcagctggactggaaataccagcaatgattctggctggctactatgtcaaacgttatggtaagcggcgaatgatggtcatagcagtggcggcaggagtactgttttacaccggattgattttctttaatagccgtatggcgttgatgacgctgcaactttttaacgctgtatttatcggcattgttgcgggtattgggatgctatggtttcaggatttaatgcctggaagagcgggggcagctaccaccttatttactaacagtatttctaccggggtaattctggctggcgttattcagggagcaattgcacaaagttgggggcactttgctgtctactgggtaattgcggttatttctgttgtcgcattatttttaaccgcaaaggttaaagacgtttgatgacgtggacgatagcggaaagcccggtcatttgaccgggcaaggggattaattcataaacgcaggttgttttgcttcataagcggcaatggcgtcgtcgtgctgcaaggtaagcccaatactgtccagaccgttcatcatgcagtggcggcggaaggcatcgatggtaaagcgataggttttctctcccgctttcacctcttgcgcttccagatccacgtcgaaatggatccccggattagctttcaccagcgcaaacagttcgtccacttctgcatcgcttaatttcaccggcagcagctggttgttaaagctattgccgtagaagatgtcagcaaaactcggcgcaatcaccactttaaaaccgtagtcggtcaatgcccagggcgcgtgctcacggctagagccacagccgaagttttctcgtgccagcaaaatggaagcgccctgatactgcgggaagttcagcacgaagtccgggtttggctgttggcctttttcatccagaaaacgccagtcgttaaacagatgcgcgccaaaacccgtacgggtcactttctgcaaaaactgtttcgggatgattgcatcggtatcgacattggcggcatccagcggaaccaccaggcctgtgtgtttgataaatttctctgccatggtgtgctccttatttaatgttgcgaatgtcggcgaaatgtccggtcacagcagcagcggcagccattgccgggctgaccagatgcgtgcgcccgccgcgcccctggcggccttcaaagttacggttgctggtggaggcacaacgttcgcccggattcagacggtcgttgttcatcgccagacacatactgcagccaggcaagcgccattcaaaaccggcttcaataaagattttatccagaccttccgcttccgcctgggcttttaccgggccagagccgggaaccaccagtgcctgcacgcctggcgcgacttttcgccctttggcgatctccgctgccgcgcgtaaatcttcaatgcggctgttggtacaggaaccgataaacactttgtcgatagccacttcggtcagcggaatacccggtttcagccccatataggccagcgctttttctgcgctcgcgcgttcaaccggatcggcaaagctagccggatcgggaatattgtcgttcacggaaatcacctggccgggattggtgccccaggtgacctgcggactaatttcttctgcttgcagagtgacaacggtatcgaaagttgcgccttcgtcggtttgcagggttttccagtaggcaacggcgtcgtcgaaatctttgcctttcggcgcatgcagacggcctttgacatagttaaaggtggtttcgtccggtgcaaccagaccggcttttgcgcccatttcgattgccatattgcacagggtcatacgaccttccatgcttaaatcacggattgcttcgccgcaaaactccaccacatgcccggtgccgcctgcgctaccggttttaccgataattgccagcacgatatcttttgcggtaatgcccggcgcggctttgccctggacttcaattttcatggtttttgcgcggccctgtttcagggtttgcgttgccagtacgtgttcaacttcggaagtgccgataccaaaggccagtgcgccaaacgcgccgtgggtggcggtatggctgtcgccgcagacaatggtcatccccggcaaggtgacgccctgttccggccccattacgtggacgatcccctgatacgggtgattcaggtcatacagttcgacgccaaattctttgcagtttttgatcagttcctgcatctggatacgcgccatttcaccgcaggcattaatgtctttggtctgggtagagacgttgtgatccatggtagcgaaggttttgcccggctgacgtaccgggcgaccgtgggcgcgcagaccatcgaacgcctgcggactggtcacttcatgcaccaggtggcggtcgatatataacagtggggtttcgttttcggcttcgtacacaacgtgagcgtcgaacaatttttcgtataacgtcttagccatgattacaccccttctgctacatagcgggcaatgatatcgcccatttcatcggtactaacggcggcagcgccacgggctaaatccccggtgcgaatgccttcttctaatgcgcggttaatggcgcgttcaatggcgcaagccgcatcatcggcatccaggctgtaacgcagcagcagtgccaggctaaggatttgtgcaatcgggttggcgatgtttttgcctgcgatatctggtgcgctgccgcccgccggttcatacagtccaaaaccttgctcgttcaggctggcggaaggcaacatccccatgctgccagtgatcattgcgcactcgtcagacagaatgtcgccaaacaggttggagcacagcagaacgtcaaactgacttggatctttaatcagctgcatggtggcgttgtcgatgtacatatgcgccagttcgacatccgggtattccgtggcgatctcgttaacgatctcccgccataaaatagaggattgcagcacgttggctttatcgatgctcgtcactttgtggcgacgcttgcgagcagattcaaacgcgatgcgggcgatacgttcgatctcaaaacggtgatacacctcggtatcaaaggctttttcatattgtccgctaccttcgcggccttttggctgaccgaaatagatgccgccggtcagttcgcgcacacacaggatgtcgaagccgtttgcggcaatgtctgcacgcagcggacagaatgcttccagcccctgatacagttttgccgggcgcaggttgctgaataatttgaagtgcttacgcagaggcagcagcgcgccgcgttctggttgctggtctggtggtaaatgttcccacttcgggccgcctacgctgccaaacagcacggcatcggcttgctcacaaccttcaaccgtcgcaggcggcagtggttgcccgtggttatcaatggctgcgccgcctacatcgtaatggctggtggtgatgcgcatcgcaaagcggttgcgcacggcatccagcactttcagcgcctgggtcatcacttccggaccaataccgtcccccggcaatacggcaatatggtaattcttgctcatcacacggtttccttgttgttttcgttgtgttgagctttgcgttgcaactctttttcgacttctgcggcacgccagatattgttcagaacgtgcaccatggctttggcagaactctcgacaatatcggtagccaggccgacgccgtggaagcggcgaccgttgtagttagcgacgatatccacctgacccagcgcatctttaccgtggcctttggcggtcaggctgtatttcaccagttcgacgttatattcagtgatgcggttaattgcctgatagacggcatcgaccggaccgttaccgttggcggcttctgctttgacttcttcgccacaggccagtttgacggcggcggtggcgatatcgttagagccagactgcacgctgaagtaatccagacggaaatgctccggctcttcttgctgcttaccgatgaaggccagcgcctccagatcgtaatcaaacacctgaccttttttgtccgccagcttcaggaaagcatcgtacaaattgtctaaattatattcactttctttataccccatctcatccatgcgatgtttcaccgccgcacgcccgctacgagaggtcagattcagctggatttggttcagaccaatagattctggtgtcatgatttcgtagttttcgcggtttttcagcacgccatcctggtgtataccggaggagtgtgcgaatgcgccgctgccaacaatggctttgtttgccgggatcggcatattacaaatctggctaactaactggctggtgcgccatatctcctggtgattaatggcggtgtggacgttgagaatatccttacgaactttgatcgccatgatgacttcttccagggaacagtttccggcacgctcgccgatcccgttcattgcgccttccacctggcgtgcaccggcatgtaccgccgccagactgtttccgaccgccaggcccaaatcgtcgtgggtatgtacggagataatggctttgtcgatgttaggcacgcgttcatacaggccgctgatgattccggcgaactcaaacggcatggtgtagcccacggtgtccggaatgttgatggtggtggcaccggcattaatcgccgcttcgaccactcgcgccagatcggcaatgggtgtacgcccggcatcttcgcaagaaaattcaacatcatcggtgtaattacgggcgcgtttcaccatatagatagcgcgttcgatcacctcgtccagcgtgctgcgcagcttggtggcgatgtgcattgggctagtggcaataaaggtatgaatacggaaggcttcggcgactttcagggattcggccgccacgtcgatatctttttccacgcagcgagctaacgcacatacgcggctgtttttaacctggcgggcgatggtttgcacgctttcaaaatcgcccgggctagagacggggaaaccgacttccatcacgtcaacacccatacgctcaagggccagcgcaatttgcagtttttctttcacactcaagcttgcctgtaacgcctgttcaccgtcgcgcaatgtggtatcgaaaataatgacttgctggctcatggtttgggtccttgtctcttttagagcgcctcgcttcgggcataaaaaaacccgcgcaatggcgcgggttttttgtttgactgcgtgctggcttaatgctggatgccgctcactcgtctaccgcgcaaagaagatgcgtttagtagtagtagaccgataaagcgaacgatgtgagtcattaaatcagctccagatgaatgcgatatgcttttagagttactggatacaaaaacggatgtcaaccctgacgcaataaaaacgtcccgccagcgtgagttctgcatccgtaaaattagctaattgtgctgcggtggttaaagtaagcgatattaatttctgcttaactaccgacgcttttcatcggttgacatatttcagcataaatttttgcatctaatcaacgaggaaaaaggggacaaaatgcacgcgttgcaaaacctatcctgatgatttgtattgaattatatgttttgcgattttttttgatattgatttggtgaatattattgatcaattaatgttaagaattaatgcattaaatatataaattaattattaaataagcacatttaatccattttgtagatgattgagtattcgcggtagttatgattagattgttttcgcaacaaaaacattatggattattatgctgtggtaaatgactcattccacggcaatggattctgtttttatcagaacccgtatctttatgttttccgaattttactcattttgctttttcttattttatatgcatgataaatcatattcttcaggattatttctctgcattccaataagggaaagggagttaagtgtgacagtggagttaagtatgccagaggtacaaacagatcatccagagacggcggagttaagcaaaccacagctacgcatggtcgatctcaacttattaaccgttttcgatgccgtgatgcaggagcaaaacattactcgtgccgctcatgttctgggaatgagccaacctgcggtcagtaacgctgttgcacgcctgaaggtgatgtttaatgacgagctttttgttcgttatggccgtggtattcaaccgactgctcgcgcatttcaactttttggtagtgttcgtcaggcattgcaactagtacaaaatgaattgcctggtagtggttttgaacccgcgagcagtgaacgtgtatttcatctttgtgtttgcagcccgttagacagcattctgaccagccagatttataatcacattgagcagattgcgccaaatatacatgttatgttcaagtctagtttaaatcagaacactgaacatcagctgcgttatcaggaaacggagtttgtgattagttatgaagacttccatcgtcctgaatttaccagcgtaccattatttaaagatgaaatggtgctggtagccagcaaaaatcatccaacaattaagggcccgttactgaaacatgatgtttataacgaacaacatgcggcggttagcctcgatcgtttcgcgagttttagtcaaccttggtatgacacggtagataagcaagccagtatcgcgtatcagggcatggcaatgatgagcgtacttagcgtggtgagccaaacgcatttggtcgctattgcgccgcgttggctggctgaagagttcgctgaatccttagaattacaggtattaccgctgccgttaaaacaaaacagcagaacctgttatctctcctggcatgaagctgccgggcgcgataaaggccatcagtggatggaagagcaattagtcagtatttgcaaacgctaactgattgcagaataggtcagacatgaatgtctggtttattctgcattttttattgaatgtagaattttattctgaatgtgtgggctctctattttaggattaattaaaaaaatagagaaattgctgtaagttgtgggattcagccgatttattatcaatttaatcctctgtaatggaggattttatcgtttcttttcacctttcctcctgtttattcttattaccccgtgtttatgtctctggctgccaattgcttaagcaagatcggacggttaatgtgttttacacattttttccgtcaaacagtgaggcaggccatggagatgttgtctggagccgagatggtcgtccgaagccttatcgatcagggcgttaaacaagtattcggttatcccggaggcgcagtccttgatatttatgatgcattgcataccgtgggtggtattgatcatgtattagttcgtcatgagcaggcggcggtgcatatggccgatggcctggcgcgcgcgaccggggaagtcggcgtcgtgctggtaacgagcggtccaggggcgaccaatgcgattactggcatcgccaccgcttatatggattccattccattagttgtcctttccgggcaggtagcgaccagcttgataggttacgatgcctttcaggagtgcgacatggtggggattagccgaccggtggttaaacacagttttctggttaagcaaacggaagacattccgcaggtgctgaaaaaggctttctggctggcggcaagtggtcgcccaggaccagtagtcgttgatttaccgaaagatattcttaatccggcgaacaaattaccctatgtctggccggagagcgtcagtatgcgttcttacaatcccactactaccggacataaagggcaaattaagcgtgctctgcaaacgctggtagcggcaaaaaaaccggttgtctacgtaggcggtggggcaatcacggcgggctgccatcagcagttgaaagaaacggtggaggcgttgaatctgcccgttgtttgcagtttgatggggctgggggcgtttccggcaacgcatcgtcaggcactgggcatgctgggaatgcacggtacctacgaagccaatatgacgatgcataacgcggatgtgattttcgccgtcggggtacgatttgatgaccgaacgacgaacaatctggcaaagtactgcccaaatgccactgttctgcatatcgatattgatcctacttccatttctaaaaccgtgactgcggatatcccgattgtgggggatgctcgccaggtcctcgaacaaatgcttgaactcttgagccaagaatccgcccatcaaccactggatgagatccgcgactggtggcagcaaattgaacagtggcgcgctcgtcagtgcctgaaatatgacactcacagtgaaaagattaaaccgcaggcggtgatcgagactctttggcggttgacgaagggagacgcttacgtgacgtccgatgtcgggcagcaccagatgtttgctgcactttattatccattcgacaaaccgcgtcgctggatcaattccggtggcctcggcacgatgggttttggtttacctgcggcactgggcgtcaaaatggcgttgccagaagaaaccgtggtttgcgtcactggcgacggcagtattcagatgaacatccaggaactgtctaccgcgttgcaatacgagttgcccgtactggtggtgaatctcaataaccgctatctggggatggtgaagcagtggcaggacatgatctattccggccgtcatagtcaatcttatatgcaaagcctacccgatttcgtccgtctggcggaagcctatgggcatgtcgggatccagatttctcatccgcatgagctggaaagcaaacttagcgaggcgctggaacaggtgcgcaataatcgcctggtgtttgttgatgttaccgtcgatggcagcgagcacgtctacccgatgcagattcgcgggggcggaatggatgaaatgtggttaagcaaaacggagagaacctgattatgcgccggatattaagtgtcttactcgaaaatgaaagtggcgcgttatcccgcgtgattggccttttttcccagcgtggctacaacattgaaagcctgaccgttgcgccaaccgacgatccgacattaagccgtatgaccatccagaccgtgggcgatgaaaaagtacttgagcagatcgaaaagcaattacacaaactggtcgatgtcttgcgcgtgagtgagttggggcagggcgcgcatgttgagcgggaaatcatgctggtgaaaattcaggccagcggttacgggcgtgacgaagtgaaacgtaatacggaaatattccgtgggcaaattatcgatgtcacacccagcctttataccgttcaattagcaggcaccagcggtaagcttgatgcatttttagcaagcattcgcgatgtggcgaaaattgtggaggttgctcgctctggtgtggtcggacttagccgcggcgataaaataatgcgttgagaatgatctcaatgcgcaatttacagcccaacatgtcacgttgggctttttttgcgaaatcagtgggaacctggaataaaagcagttgccgcagttaattttctgcgcttagatgttaatgaatttaacccataccagtacaatggctatggtttttacattttacgcaaggggcaattgtgaaactggatgaaatcgctcggctggcgggagtgagccggaccactgcaagctatgttattaacggcaaagcgaagcaataccgtgtgagcgacaaaaccgttgaaaaagtcatggctgtggtgcgtgagcacaattaccacccgaacgccgtggcagctgggcttcgtgctggacgcacacgttctattggtcttgtgatccccgatctggagaacaccagctatacccgcatcgctaactatcttgaacgccaggcgcggcaacggggttatcaactgctgattgcctgcagtgaagatcagccagacaacgaaatgcggtgcattgagcaccttttacagcgtcaggttgatgccattattgttagcacgagcttgcctcctgagcatcctttttatcaacgctgggctaacgacccgttcccgattgtcgcgctggaccgcgccctcgatcgtgaacacttcaccagcgtggttggtgccgatcaggatgatgccgaaatgctggcggaagagttacgtaagtttcccgccgagacggtgctttatcttggtgcgctaccggagctttctgtcagcttcctgcgtgaacaaggtttccgtactgcctggaaagatgatccgcgcgaagtgcatttcctgtatgccaacagctatgagcgggaggcggctgcccagttattcgaaaaatggctggaaacgcatccgatgccgcaggcgctgttcacaacgagctttgcgttgttgcaaggagtgatggatgtcacgctgcgtcgcgacggcaaactgccttctgacctggcaattgccacctttggcgataacgaactgctcgacttcttacagtgtccggtgctggcagtggctcaacgtcaccgcgatgtcgcagagcgtgtgctggagattgtcctggcaagcctggacgaaccgcgtaagccaaaacctggtttaacgcgcattaaacgtaatctctatcgccgcggcgtgctcagccgtagctaagccgcgaacaaaaatacgcgccaggtgaatttccctctggcgcgtagagtacgggactggacatcaatatgcttaaagtaaataagactattcctgactattattgataaatgcttttaaacccgcccgttaattaactcaccagctgaaattcacaataattaagtgatatcgacagcgcgtttttgcattattttgttacatgcggcgatgaattgccgatttaacaaacacttttctttgcttttgcgcaaacccgctggcatcaagcgccacacagacgtaacaaggactgttaaccggggaagatatgtcctaaaatgccgctcgcgtcgcaaactgacactttatatttgctgtggaaaatagtgagtcattttaaaacggtgatgacgatgagggattttttcttacagctattcataacgttaatttgcttcgcacgttggacgtaaaataaacaacgctgatattagccgtaaacatcgggttttttacctcggtatgccttgtgactggcttgacaagcttttcctcagctccgtaaactcctttcagtgggaaattgtggggcaaagtgggaataaggggtgaggctggcatgttccggggagcaacgttagtcaatctcgacagcaaagggcgcttaagtgtgcctacccgttatcgggaacagctgcttgagaacgctgccggtcaaatggtttgcaccattgacatttatcacccgtgcctgctgctttaccccctgcctgaatgggaaattatcgagcaaaaattaagccgtctgagcagcatgaacccggttgagcgccgtgtgcagcgcctactgttaggtcatgccagcgaatgtcagatggatggcgcaggtcgattgttaatcgcgccagtactgcggcaacatgccgggctgacaaaagaagtgatgctggttggacagttcaacaagtttgagctgtgggatgaaacaacctggcatcaacaggtcaaggaagatatcgacgcagagcagttggctaccggagacttaagcgagcgactgcaggacttgtctctataaaatgatggaaaactataaacatactacggtgctgctggatgaagccgttaatggcctcaatatccgtcctgatggcatctacattgatgggacttttggtcgcggtggtcacagtcgtctgatcctcagccagcttggcgaagaggggcgtttgctggcgatcgatcgcgacccgcaggctatcgccgttgcgaagactattgatgatccgcgcttctccatcatccacggacctttctccgcgctgggcgaatacgttgccgagcgcgatcttatcggcaagatcgacggcattctcctcgatcttggcgtctctagtccgcaacttgatgatgctgaacgtggcttttcctttatgcgcgatggtccgctggacatgcgtatggacccaacccgtgggcagagtgccgctgaatggctacaaaccgcagaagaagccgatatcgcctgggtattgaaaacctatggtgaagagcgttttgccaaacgcattgcccgcgccattgtcgagcgtaaccgcgaacagccgatgacccgcaccaaagaactggcggaagtcgtggctgctgcaacgccggtgaaagataagtttaaacatcccgcgacccgtaccttccaggcggtgcgcatttgggtaaacagtgaactggaggagatagagcaggcgctaaaaagcagcctcaacgtgctggccccgggtgggcggcttagcatcatcagcttccacagcctggaagaccgtattgtgaaacgttttatgcgtgaaaacagccgcggtccgcaagttccggcagggttaccgatgactgaagagcagctcaaaaaactgggtggccgtcagctgcgagcactaggcaagttaatgccgggcgaagaagaggtggctgagaaccctcgtgcccgtagtagtgttctgcgtattgcagagaggacgaatgcatgatcagcagagtgacagaagctctaagcaaagttaaaggaagcatgggaagccacgagcgccatgcattgcctggtgttatcggtgacgatcttttgcgatttgggaagctgccactctgcctgttcatttgcattattttgacggcggtgactgtggtaaccacggcgcaccatacccgtttactgaccgctcagcgcgaacaactggtgctggagcgagatgctttagacattgaatggcgcaacctgatccttgaagagaatgcgctcggcgaccatagccgggtggaaaggatcgccacggaaaagctgcaaatgcagcatgttgatccgagtcaagaaaatatcgtagtgcaaaaataaggataaacgcgacgcatgaaagcagcggcgaaaacgcagaaaccaaaacgtcaggaagaacatgccaactttatcagttggcgttttgcgttgttatgcggctgtattctcctggcgctggcttttctgctcggacgcgtagcgtggttacaagttatctccccggatatgctggtgaaagagggcgacatgcgttctcttcgcgttcagcaagtttccacctcccgcggcatgattactgaccgttctggtcgcccgttagcggtgagcgtgccggtaaaagcgatttgggctgacccgaaagaagtgcatgacgctggcggtatcagcgtcggtgaccgctggaaggcgctggctaacgcgctcaatattccgctggatcagcttagtgcccgcattaacgccaacccgaaagggcgctttatttatctggcgcgtcaggtgaaccctgacatggcggactacatcaaaaaactgaaactgccggggattcatctgcgtgaagagtctcgccgttactatccgtccggcgaagtgactgctcacctcatcggctttactaacgtcgatagtcaagggattgagggcgttgagaagagtttcgataaatggcttaccgggcagccgggtgagcgcattgtgcgtaaagaccgctatggtcgcgtaattgaagatatttcttctactgacagccaggcagcgcacaacctggcgctgagtattgatgaacgcctgcaggcgctggtttatcgcgaactgaacaacgcggtggcctttaacaaggctgaatctggtagcgccgtgctggtggatgtcaacaccggtgaagtgctggcgatggctaacagcccgagttacaaccctaacaatctgagcggcacgccgaaagaggcgatgcgtaaccgtaccatcaccgacgtgtttgaaccgggcagtacggttaaaccgatggtggtaatgaccgcgttgcaacgtggcgtggtgcgggaaaacagcgtactcaataccattccttatcgaattaacggccacgaaatcaaagacgtggcacgctacagcgaattaaccctgaccggggtattacagaagagcagtaacgtcggtgtttccaagctggcgttagcgatgccgtccagtgcgttagtagatacttacagtcgttttggactgggaaaagcgaccaatttggggttggtcggagaacgcagtggcttatatcctcaaaaacaacggtggtctgacatagagagggccaccttctctttcggctacgggctaatggtaacaccattacagttagcgcgagtctacgcaactatcggcagctacggcatttatcgcccactgagcattaccaaagttgaccccccggttcccggtgaacgtgtcttcccggaatccattgtccgcactgtggtgcatatgatggaaagcgtggcgctaccaggcggcggcggcgtgaaggcggcgattaaaggctatcgtatcgccattaaaaccggtaccgcgaaaaaggtcgggccggacggtcgctacatcaataaatatattgcttataccgcaggcgttgcgcctgcgagtcagccgcgcttcgcgctggttgttgttatcaacgatccgcaggcgggtaaatactacggcggcgccgtttccgcgccggtctttggtgccatcatgggcggcgtattgcgtaccatgaacatcgagccggatgcgctgacaacgggcgataaaaatgaatttgtgattaatcaaggcgaggggacaggtggcagaagctaaagcctgagcgcttcgcgctggttgttgttatcaacgatccgcaggcgggtaaatactacggcggcgccgtttccgcgccggtctttggtgccatcatgggcggcgtattgcgtaccatgaacatcgagccggatgcgctgacaacgggcgataaaaatgaatttgtgattaatcaaggcgaggggacaggtggcagatcgtaatttgcgcgaccttcttgctccgtgggtgccagacgcacctagccgagcactgcgagagatgacactcgacagccgtgtggctgcggcgggcgatctctttgtagctgtagtaggtcatcaggcggacgggcgtcgatatatcccgcaggcgatagcgcaaggtgtggctgccattattgcagaggcgaaagatgaggcgaccgatggtgaaatccgtgaaatgcacggcgtaccggtcatctatctcagccagctcaacgagcgtttatctgcactggcgggccgcttttaccatgaaccctctgacaatttacgtctcgtgggcgtaacgggcaccaacggcaaaaccacgactacccagctgttggcgcagtggagccaactgcttggcgaaatcagcgcggtaatgggcaccgttggtaacggcctgctggggaaagtgatcccgacagaaaatacaaccggtagcgcagtcgatgttcagcatgagctggcggggctggtggatcagggcgcgacgttttgcgcaatggaagtttcctcccacgggctggtacagcaccgtgtggcggcattgaaatttgcggcgagcgtctttaccaacttaagccgcgatcaccttgattatcatggtgatatggaacactacgaagccgcgaaatggctgctttattctgagcatcattgcggtcaggcgattattaacgccgacgatgaagtgggccgccgctggctggcaaaactgccggacgcggttgcggtaagtatggaagatcatattaatccgaactgtcacggacgctggttgaaagcgaccgaagtgaactatcacgacagcggtgcgacgattcgctttagcagtagttggggcgatggcgaaattgaaagccatctgatgggcgcttttaacgtcagcaacctgctgctcgcgctggcgacactgttggcactcggctatccactggctgatctgctgaaaaccgccgcgcgtctgcaaccggtttgcggacgtatggaagtgttcactgcgccaggcaaaccgacggtggtggtggattacgcgcatacgccggatgcactggaaaaagccttacaggcggcgcgtctgcactgtgcgggcaagctgtggtgtgtctttggctgtggtggcgatcgcgataaaggtaagcgtccactgatgggcgcaattgccgaagagtttgctgacgtggcggtggtgacggacgataacccgcgtaccgaagaaccgcgtgccatcatcaacgatattctggcgggaatgttagatgccggacatgccaaagtgatggaaggccgtgctgaagcggtgacttgcgccgttatgcaggctaaagagaatgatgtggtactggtcgcgggcaaaggccatgaagattaccagattgttggcaatcagcgtctggactactccgatcgcgtcacggtggcgcgtctgctgggggtgattgcatgattagcgtaacccttagccaacttaccgacattctcaacggtgaactgcaaggtgcagatatcacccttgatgctgtaaccactgatacccgaaaactgacgccgggctgcctgtttgttgccctgaaaggcgaacgttttgatgcccacgattttgccgaccaggcgaaagctggcggcgcaggcgcactactggttagccgtccgctggacatcgacctgccgcagttaatcgtcaaggatacgcgtctggcgtttggtgaactggctgcatgggttcgccagcaagttccggcgcgcgtggttgctctgacggggtcctccggcaaaacctccgttaaagagatgacggcggcgattttaagccagtgcggcaacacgctttatacggcaggcaatctcaacaacgacatcggtgtaccgatgacgctgttgcgcttaacgccggaatacgattacgcagttattgaacttggcgcgaaccatcagggcgaaatagcctggactgtgagtctgactcgcccggaagctgcgctggtcaacaacctggcagcggcgcatctggaaggttttggcagccttgcgggtgtcgcgaaagcgaaaggtgaaatctttagcggcctgccggaaaacggtatcgccattatgaacgccgacaacaacgactggctgaactggcagagcgtaattggcagtcgcaaagtgtggcgtttcagtcccaatgccgccaacagcgatttcaccgccaccaatatccatgtgaccagccacggtacggaatttaccctacaaaccccaaccggtagcgtcgatgttctgctgccgttgccggggcgtcacaatattgcgaatgcgctggcagccgctgcgctctccatgtccgtgggcgcaacgcttgatgctatcaaagcggggctggcaaatctgaaagctgttccaggccgtctgttccccatccaactggcagaaaaccagttgctgctcgacgactcctacaacgccaatgtcggtagtatgactgcagcagtccaggtactggctgaaatgccgggctaccgcgtgctggtggtgggcgatatggcggaactgggcgctgaaagcgaagcctgccatgtacaggtgggcgaggcggcaaaagctgctggtattgaccgcgtgttaagcgtgggtaaacaaagccatgctatcagcaccgccagcggcgttggcgaacattttgctgataaaactgcgttaattacgcgtcttaaattactgattgctgagcaacaggtaattacgattttagttaagggtagtcgtagtgccgccatggaagaggtagtacgcgctttacaggagaatgggacatgttaatataagctttacaggagaatgggacatgttagtttggctggccgaacatttggtcaaatattattccggctttaacgtcttttcctatctgacgtttcgcgccatcgtcagcctgctgaccgcgctgttcatcagtttgtggatgggcccgcgtatgattgctcatttgcaaaaactttcctttggtcaggtggtgcgtaacgacggtcctgaaagtcacttcagcaagcgcggtacgccgaccatgggcgggattatgatcctgacggcgattgtgatctccgtactgctgtgggcttacccgtccaatccgtacgtctggtgcgtgttggtggtgctggtaggttacggtgttattggctttgttgatgattatcgcaaagtggtgcgtaaagacaccaaagggttgatcgctcgttggaagtatttctggatgagcgtcattgcgctgggtgtcgccttcgccctgtaccttgccggcaaagacacgcccgcaacgcagctggtggtcccattctttaaagatgtgatgccgcagctggggctgttctacattctgctggcttacttcgtcattgtgggtactggcaacgcggtaaacctgaccgatggtctcgacggcctggcaattatgccgaccgtatttgtcgccggtggttttgcgctggtggcgtgggcgaccggcaatatgaactttgccagctacttgcatataccgtatctgcgacacgccggggaactggttattgtctgtaccgcgatagtcggggcaggactgggcttcctgtggtttaacacctatccggcgcaggtctttatgggcgatgtaggtagcctggcgttaggtggtgcgttaggcattatcgccgtactgctacgtcaggaattcctgctggtgattatggggggcgtgttcgtggtagaaacgctttctgtcatcctgcaggtcggctcctttaaactgcgcggacaacgtattttccgcatggcaccgattcatcaccactatgaactgaaaggctggccggaaccgcgcgtcattgtgcgtttctggattattagcctgatgctggttctgattggtctggcaacgctgaaggtacgttaatcatggctgattatcagggtaaaaatgtcgtcattatcggcctgggcctcaccgggctttcctgcgtggactttttcctcgctcgcggtgtgacgccgcgcgttatggatacgcgtatgacaccgcctggcctggataaattacccgaagccgtagaacgccacacgggcagtctgaatgatgaatggctgatggcggcagatctgattgtcgccagtcccggtattgcactggcgcatccatccttaagcgctgccgctgatgccggaatcgaaatcgttggcgatatcgagctgttctgtcgcgaagcacaagcaccgattgtggcgattaccggttctaacggcaaaagcacggtcaccacgctagtgggtgaaatggcgaaagcggcgggggttaacgttggtgtgggtggcaatattggcctgcctgcgttgatgctactggatgatgagtgtgaactgtacgtgctggaactgagcagcttccagctggaaaccacctccagcttacaggcggtagcagcgaccattctgaacgtgactgaagatcatatggatcgctatccgtttggtttacaacagtatcgtgcagcaaaactgcgcatttacgaaaacgcgaaagtttgcgtggttaatgctgatgatgccttaacaatgccgattcgcggtgcggatgaacgctgcgtcagctttggcgtcaacatgggtgactatcacctgaatcatcagcagggcgaaacctggctgcgggttaaaggcgagaaagtgctgaatgtgaaagagatgaaactttccgggcagcataactacaccaatgcgctggcggcgctggcgctggcagatgctgcagggttaccgcgtgccagcagcctgaaagcgttaaccacattcactggtctgccgcatcgctttgaagttgtgctggagcataacggcgtacgttggattaacgatagcaaagcgaccaacgtcggcagtacggaagcggcgctgaatggcctgcacgtagacggcacactgcatttgttgctgggtggcgatggtaaaagcgcggactttagcccactggcgcgttacctgaatggcgataacgtacgtctgtattgtttcggtcgtgacggcgcgcagctggcggcgctacgtccggaagtggcagaacaaaccgaaactatggaacaggcgatgcgcttgctggctccgcgtgttcagccgggcgatatggttctgctctccccagcctgtgccagccttgatcagttcaagaactttgaacaacgaggcaatgagtttgcccgtctggcgaaggagttaggttgatgcgtttatctctccctcgcctgaaaatgccgcgcctgccaggattcagtatcctggtctggatctccacggcgctaaagggctgggtgatgggcagccgggaaaaagataccgacagcctgatcatgtacgatcgcaccttactgtggctgaccttcggcctcgcggcgattggctttatcatggtgaccagcgcgagtatgcccatagggcaacgcttaaccaacgatccgttcttcttcgcgaagcgtgatggtgtctatctgattttggcgtttattctggcgatcattacgctgcgtctgccgatggagttctggcaacgctacagtgccacgatgctgctcggatctatcatcctgctgatgatcgtcctggtagtgggtagcagcgttaaaggggcaagccgttggatcgatctcggtttgctgcgtatccagcctgcggagctgacaaaactgagcctgttttgctatatcgccaactatctggtgcgtaaaggcgacgaagtacgtaataacctgcgcggcttcctgaaaccgatgggcgtgattctggtgttggcagtgttactgctggcacagccagaccttggtacggtggtggtgttgtttgtgactacgctggcgatgttgttcctggcgggagcgaaattgtggcagttcattgccattatcggtatgggcattagtgcggttgtgttgctgatactcgccgaaccgtaccgtatccgccgtgttaccgcattctggaacccgtgggaagatccctttggcagcggctatcagttaacgcaaagcctgatggcgtttggtcgcggcgaactttgggggcaaggtttaggtaacagcgtacaaaaactggagtatctgccggaagcgcacactgactttattttcgccattatcggcgaagaactggggtatgtcggtgtggtgctggcacttttaatggtattcttcgtcgcttttcgcgcgatgagcattggccgtaaagcattagaaattgaccaccgtttttccggttttctcgcctgttctattggcatctggtttagcttccaggcgctggttaacgtaggcgcggcggcggggatgttaccgaccaaaggtctgacattgccgctgatcagttacggtggtagcagcttactgattatgagcacagccatcatgatgctgttgcgtattgattatgaaacgcgtctggagaaagcgcaggcgtttgtacgaggtagtcgatgagtggtcaaggaaagcgattaatggtgatggcaggcggaaccggtggacatgtattcccgggactggcggttgcgcaccatctaatggctcagggttggcaagttcgctggctggggactgccgaccgtatggaagcggacttagtgccaaaacatggcatcgaaattgatttcattcgtatctctggtctgcgtggaaaaggtataaaagcactgatagctgccccgctgcgtatcttcaacgcctggcgtcaggcgcgggcgattatgaaagcgtacaaacctgacgtggtgctcggtatgggaggctacgtgagtggtccaggtggtctggccgcgtggagcttaggcattccggttgtacttcatgaacaaaacggtattgcgggcttaaccaataaatggctggcgaagattgccaccaaagtgatgcaggcgtttccaggtgctttccctaatgcggaagtagtgggtaacccggtgcgtaccgatgtgttggcgctgccgttgccgcagcaacgtttggctggacgtgaaggtccggttcgtgtgctggtagtgggtggttctcagggcgcacgcattcttaaccagacaatgccgcaggttgctgcgaaactgggtgatagtgtcactatctggcatcagagcggcaaaggtagccaacaatccgttgaacaggcgtatgccgaagcggggcaaccgcagcataaagtgacggaatttattgatgatatggcggcggcgtatgcgtgggcggatgtcgtcgtttgccgctccggtgcgttaacggtgagtgaaatcgccgcggcaggactaccggcgttgtttgtgccgtttcaacataaagaccgccagcaatactggaatgcgctaccgctggaaaaagcgggcgcagccaaaattatcgagcagccacagcttagcgtggatgctgtcgccaacaccctggccgggtggagccgagaaaccttattaaccatggcagaacgcgcccgcgctgcatccattccggatgccaccgagcgagtggcaaatgaagtgagccgggttgcccgggcgtaattgtagcgatgccttttgcatcgtatgaatttaagaagttaatggcgtaaagaatgaatacacaacaattggcaaaactgcgttccatcgtgcccgaaatgcgtcgcgttcggcacatacattttgtcggcattggtggtgccggtatgggcggtattgccgaagttctggccaatgaaggttatcagatcagtggttccgatttagcgccaaatccggtcacgcagcagttaatgaatctgggtgcgacgatttatttcaaccatcgcccggaaaacgtacgtgatgccagcgtggtcgttgtttccagcgcgatttctgccgataacccggaaattgtcgccgctcatgaagcgcgtattccggtgatccgtcgtgccgaaatgctggctgagttaatgcgttttcgtcatggcatcgccattgccggaacgcacggcaaaacgacaaccaccgcgatggtttccagcatctacgcagaagcggggctcgacccaaccttcgttaacggcgggctggtaaaagcggcgggggttcatgcgcgtttggggcatggtcggtacctgattgccgaagcagatgagagtgatgcaagcttcctgcatctgcaaccgatggtggcgattgtcaccaatatcgaagccgaccacatggatacctaccagggcgactttgagaatttaaaacagacttttattaattttctgcacaacctgccgttttacggtcgtgcggtgatgtgtgttgatgatccggtgatccgcgaattgttaccgcgagtggggcgtcagaccacgacttacggcttcagcgaagatgccgacgtgcgtgtagaagattatcagcagattggcccgcaggggcactttacgctgctgcgccaggacaaagagccgatgcgcgtcaccctgaatgcgccaggtcgtcataacgcgctgaacgccgcagctgcggttgcggttgctacggaagagggcattgacgacgaggctattttgcgggcgcttgaaagcttccaggggactggtcgccgttttgatttcctcggtgaattcccgctggagccagtgaatggtaaaagcggtacggcaatgctggtcgatgactacggccaccacccgacggaagtggacgccaccattaaagcggcgcgcgcaggctggccggataaaaacctggtaatgctgtttcagccgcaccgttttacccgtacgcgcgacctgtatgatgatttcgccaatgtgctgacgcaggttgataccctgttgatgctggaagtgtatccggctggcgaagcgccaattccgggagcggacagccgtagcctgtgtcgcacaattcgtggacgtgggaaaattgatcccattctggtgccggatccggcgcgggtagccgagatgctggcaccggtattaaccggtaacgacctgattctcgttcagggggctggtaatattggaaaaattgcccgttctttagctgaaatcaaactgaagccgcaaactccggaggaagaacaacatgactgataaaatcgcggtcctgttgggtgggacctccgctgagcgggaagtttctctgaattctggcgcagcggtgttagccggactgcgtgaaggcggtattgacgcgtatcctgtcgacccgaaagaagtcgacgtgacgcaactgaagagcatgggctttcagaaagtgtttatcgcgctacacggtcgcggcggtgaagatggtacgctgcaggggatgctcgagctgatgggcttgccttataccggaagcggagtgatggcatctgcgcttagtatggataaactacgcagcaaacttctatggcaaggtgccggtttaccggtcgcgccgtgggtagcgttaacccgcgcagagtttgaaaaaggcctgagcgataagcagttagcagaaatttctgctctgggtttgccggttatcgttaagccgagccgcgaaggttccagtgtgggaatgagtaaagtagtagcagaaaatgctctacaagatgcattaagattggcatttcagcacgatgaagaagtattgattgaaaaatggctaagtgggccggagttcacggttgcgatactcggtgaagaaattttaccgagtatacgtattcaaccgtccggaaccttctatgattatgaggcgaagtatctctctgatgagacacagtatttctgccccgcaggtctggaagcgagtcaagaggccaatttgcaggcattagtgctgaaagcatggacgacgttaggttgcaaaggatggggacgtattgacgttatgctggacagcgatggacagttttatctgctggaagccaataccagtccgggtatgaccagccacagcctggtgccgatggcggcacgtcaggcaggtatgagcttcagccagttggtagtacgaattctggaactggcggactaatatgagccaggctgctctgaacacgcgaaacagcgaagaagaggtttcttctcgccgcaataatggaacgcgtctggcggggatccttttcctgctgaccgttttaacgacagtgttggtgagcggctgggtcgtgttgggctggatggaagatgcgcaacgcctgccgctcagtaagctggtgttgaccggtgaacgccattacacacgtaatgacgatatccggcagagcatcctggcattgggtgagccgggtacctttatgacccaggatgtcaacatcatccagacgcaaatagaacaacgcctgccgtggattaagcaggtgagcgtcagaaagcagtggcctgatgaattgaagattcatctggttgaatatgtgccgattgcgcggtggaatgatcaacatatggtagacgcggaaggaaataccttcagcgtgccgccagaacgcaccagcaagcaggtgcttccaatgctgtatggcccggaaggcagcgccaatgaagtgttgcagggctatcgcgaaatggggcagatgctggcaaaggacagatttactctgaaggaagcggcgatgaccgcgcggcgttcctggcagttgacgctgaataacgatattaagctcaatcttggccggggcgatacgatgaaacgtttggctcgctttgtagaactttatccggttttacagcagcaggcgcaaaccgatggcaaacggattagctacgttgatttgcgttatgactctggagcggcagtaggctgggcgcccttgccgccagaggaatctactcagcaacaaaatcaggcacaggcagaacaacaatgatcaaggcgacggacagaaaactggtagtaggactggagattggtaccgcgaaggttgccgctttagtaggggaagttctgcccgacggtatggtcaatatcattggcgtgggcagctgcccgagccgtggtatggataaaggcggggtgaacgacctcgaatccgtggtcaagtgcgtacaacgcgccattgaccaggcagaattgatggcagattgtcagatctctagcgtatatctggcgctttctggtaagcacatcagctgccagaatgaaattggtatggtgcctatttctgaagaagaagtgacgcaagaagatgtggaaaacgtcgtccataccgcgaaaagcgtgcgtgtgcgcgatgagcatcgtgtgctgcatgtgatcccgcaagagtatgcgattgactatcaggaagggatcaagaatccggtaggacttagcggcgtgcggatgcaggcaaaagtgcacctgatcacatgtcacaacgatatggcgaaaaacatcgtcaaagcggttgaacgttgtgggctgaaagttgaccaactgatatttgccggactggcaagtagttatagcgtattgacggaagatgaacgtgaactgggtgtctgcgtcgtcgatatcggtggtggtacaatggatatcgccgtttataccggtggggcattgcgccacactaaggtaattccttatgctggcaatgtcgtgaccagtgatatcgcttacgcctttggcacgccgccaagcgacgccgaagcgattaaagttcgccacggttgtgcgctgggttccatcgttggaaaagatgagagcgtggaagtgccgagcgtaggtggtcgtccgccacggagtctgcaacgtcagacactggcagaggtgatcgagccgcgctataccgagctgctcaacctggtcaacgaagagatattgcagttgcaggaaaagcttcgccaacaaggggttaaacatcacctggcggcaggcattgtattaaccggtggcgcagcgcagatcgaaggtcttgcagcctgtgctcagcgcgtgtttcatacgcaagtgcgtatcggcgcgccgctgaacattaccggtttaacggattatgctcaggagccgtattatagcacggcggtgggattgcttcactatgggaaagagagtcatcttaacggtgaagctgaagtagaaaaacgtgttacagcaagtgttggcagctggatcaagcgactcaatagttggctgcgaaaagagttttaatttttatgaggccgacgatgattacggcctcaggcgacaggcacaaatcggagagaaactatgtttgaaccaatggaacttaccaatgacgcggtgattaaagtcatcggcgtcggcggcggcggcggtaatgctgttgaacacatggtgcgcgagcgcattgaaggtgttgaattcttcgcggtaaataccgatgcacaagcgctgcgtaaaacagcggttggacagacgattcaaatcggtagcggtatcaccaaaggactgggcgctggcgctaatccagaagttggccgcaatgcggctgatgaggatcgcgatgcattgcgtgcggcgctggaaggtgcagacatggtctttattgctgcgggtatgggtggtggtaccggtacaggtgcagcaccagtcgtcgctgaagtggcaaaagatttgggtatcctgaccgttgctgtcgtcactaagcctttcaactttgaaggcaagaagcgtatggcattcgcggagcaggggatcactgaactgtccaagcatgtggactctctgatcactatcccgaacgacaaactgctgaaagttctgggccgcggtatctccctgctggatgcgtttggcgcagcgaacgatgtactgaaaggcgctgtgcaaggtatcgctgaactgattactcgtccgggtttgatgaacgtggactttgcagacgtacgcaccgtaatgtctgagatgggctacgcaatgatgggttctggcgtggcgagcggtgaagaccgtgcggaagaagctgctgaaatggctatctcttctccgctgctggaagatatcgacctgtctggcgcgcgcggcgtgctggttaacatcacggcgggcttcgacctgcgtctggatgagttcgaaacggtaggtaacaccatccgtgcatttgcttccgacaacgcgactgtggttatcggtacttctcttgacccggatatgaatgacgagctgcgcgtaaccgttgttgcgacaggtatcggcatggacaaacgtcctgaaatcactctggtgaccaataagcaggttcagcagccagtgatggatcgctaccagcagcatgggatggctccgctgacccaggagcagaagccggttgctaaagtcgtgaatgacaatgcgccgcaaactgcgaaagagccggattatctggatatcccagcattcctgcgtaagcaagctgattaagaattgactggaatttgggtttcgaggctctttgtgctaaactggcccgccgaatgtatagtacacttcggttggataggtaatttggcgagataatacgatgatcaaacaaaggacacttaaacgtatcgttcaggcgacgggtgtcggtttacataccggcaagaaagtcaccctgacgttacgccctgcgccggccaacaccggggtcatctatcgtcgcaccgacttgaatccaccggtagatttcccggccgatgccaaatctgtgcgtgataccatgctctgtacgtgtctggtcaacgagcatgatgtacggattagtaccgtagagcacctcaatgctgctctcgcgggcttgggcatcgataacattgttatcgaagttaacgcgccggaaatcccgatcatggacggcagcgccgctccgtttgtatacctgctgcttgacgccggtatcgacgagttgaactgcgccaaaaaatttgttcgcatcaaagagactgttcgtgtcgaagatggcgataagtgggctgaatttaagccgtacaatggttttagcctggatttcaccatcgattttaaccatccggctattgattccagcaaccagcgctatgcgatgaacttctccgctgatgcgtttatgcgccagatcagccgtgcgcgtacgttcggtttcatgcgtgatatcgaatatctgcagtcccgtggtttgtgcctgggcggcagcttcgattgtgccatcgttgttgacgattatcgcgtactgaacgaagacggcctgcgttttgaagacgaatttgtgcgtcacaaaatgctcgatgcgatcggtgacttgttcatgtgtggtcacaatattattggtgcatttaccgcttataaatccggtcatgcactgaataacaaactgctgcaggctgtcctggcgaaacaggaagcctgggaatatgtgaccttccaggacgacgcagaactgccgttggccttcaaagcgcctagtgctgtactggcataacgacatttatactgtcgtataaaattcgactggcaaatctggcactctctccggccaggtgaaccagtcgtttttttttgaattttataagagctataaaaaacggtgcgaacgctgttttcttaagcacttttccgcacaacttatcttcattcgtgctgtggactgcaggctttaatgataagatttgtgcgctaaatacgtttgaatatgatcgggatggcaataacgtgagtggaatactgacgcgctggcgacagtttggtaaacgctacttctggccgcatctcttattagggatggttgcggcgagtttaggtttgcctgcgctcagcaacgccgccgaaccaaacgcgcccgcaaaagcgacaacccgcaaccacgagcctagtgccaaagttaactttggtcaattggccttgctggaagcgaacacacgccgcccgaatagcaactattccgttgattactggcatcaacatgccattcgcacggtaatccgtcatctttctttcgcaatggcaccgcaaacactgcccgttgctgaagaatctttgcctcttcaggcgcaacatcttgcattactggatacgctcagcgcgctgctgacccaggaaggcacgccgtctgaaaagggttatcgcattgattatgcgcattttaccccacaagcaaaattcagcacgcccgtctggataagccaggcgcaaggcatccgtgctggccctcaacgcctcacctaacaacaataaacctttacttcattttattaactccgcaacgcggggcgtttgagattttattatgctaatcaaattgttaactaaagttttcggtagtcgtaacgatcgcaccctgcgccggatgcgcaaagtggtcaacatcatcaatgccatggaaccggagatggaaaaactctccgacgaagaactgaaagggaaaaccgcagagtttcgtgcacgtctggaaaaaggcgaagtgctggaaaatctgatcccggaagctttcgccgtggtacgtgaggcaagtaagcgcgtctttggtatgcgtcacttcgacgttcagttactcggcggtatggttcttaacgaacgctgcatcgccgaaatgcgtaccggtgaaggaaaaaccctgaccgcaacgctgcctgcttacctgaacgcactaaccggtaaaggcgtgcacgtagttaccgtcaacgactacctggcgcaacgtgacgccgaaaacaaccgtccgctgtttgaattccttggcctgactgtcggtatcaacctgccgggcatgccagcaccggcaaagcgcgaagcttacgcagctgacatcacttacggtacgaacaacgaatacggctttgactacctgcgcgacaacatggcgttcagccctgaagaacgtgtacagcgtaaactgcactatgcgctggtggacgaagtggactccatcctgatcgatgaagcgcgtacaccgctgatcatttccggcccggcagaagacagcagcgaaatgtataaacgcgtgaataaaattattccgcacctgatccgtcaggaaaaagaagactccgaaaccttccagggcgaaggccacttcagcgtggacgaaaaatctcgccaggtgaacctgaccgaacgtggtctggtgctgattgaagaactgctggtgaaagagggcatcatggatgaaggggagtctctgtactctccggccaacatcatgctgatgcaccacgtaacggcggcgctgcgcgctcatgcgctgtttacccgtgacgtcgactacatcgttaaagatggtgaagttatcatcgttgacgaacacaccggtcgtaccatgcagggccgtcgctggtccgatggtctgcaccaggctgtggaagcgaaagaaggtgtgcagatccagaacgaaaaccaaacgctggctagcatcaccttccagaactacttccgtctgtatgaaaaactggcggggatgaccggtactgctgataccgaagctttcgaatttagcagtatctacaagctggataccgtcgttgttccgaccaaccgtccaatgattcgtaaagatctgccggacctggtctacatgactgaagcggaaaaaattcaggcgatcattgaagatatcaaagaacgtactgcgaaaggccagccggtgctggtgggtactatctccatcgaaaaaagcgagctggtgagtaacgaactgaccaaagccggtattaagcacaacgtcctgaacgccaaattccacgccaacgaagcggcgattgttgctcaggcaggttatccggctgcggtgactatcgcgaccaatatggcgggtcgtggtacagatattgtgctcggtggtagctggcaggcagaagttgccgcgctggaaaatccgaccgcagagcaaattgaaaaaattaaagccgactggcaggtacgtcacgatgcggtactggaagcaggtggcctgcatatcatcggtaccgagcgtcacgaatcccgtcgtatcgataaccagttgcgcggtcgttctggtcgtcagggggatgctggttcttcccgtttctacctgagcatggaagatgcgctgatgcgtatttttgcttccgaccgagtatccggcatgatgcgtaaactgggtatgaagccaggcgaagccattgaacacccgtgggtgactaaagcgattgccaacgcccagcgtaaagttgaaagccgtaacttcgacattcgtaagcaactgctggaatatgatgacgtggctaacgatcagcgtcgcgccatttactcccagcgtaacgaactgttggatgtcagcgatgtgagcgaaaccattaacagcattcgtgaagatgtgttcaaagcgaccattgatgcctacattccaccacagagcctggaagaaatgtgggatattccggggctgcaggaacgtctgaagaacgatttcgacctcgatttgccaattgccgagtggctggataaagaaccagaactgcatgaagagacgctgcgtgagcgcattctggcgcagtccatcgaagtgtatcagcgtaaagaagaagtggttggtgctgagatgatgcgtcacttcgagaaaggcgtcatgctgcaaacgcttgactccctgtggaaagagcacctggcagcgatggactatctgcgtcagggtatccacctgcgtggctacgcacagaaagatccgaagcaggaatacaaacgtgaaagcttctccatgtttgcagcgatgctggagagcttgaaatatgaagttatcagtacgctgagcaaagttcaggtacgtatgcctgaagaggttgaggagctggaacaacagcgtcgtatggaagccgagcgtttagcgcaaatgcagcagcttagccatcaggatgacgactctgcagccgcagctgcactggcggcgcaaaccggagagcgcaaagtaggacgtaacgatccttgcccgtgcggttctggtaaaaaatacaagcagtgccatggccgcctgcaataaaagctaactgttgaagtaaaaggcgcaggattctgcgccttttttataggtttaagacaatgaaaaagctgcaaattgcggtaggtattattcgcaacgagaacaatgaaatctttataacgcgtcgcgcagcagatgcgcacatggcgaataaactggagtttcccggcggtaaaattgaaatgggtgaaacgccggaacaggcggtggtgcgtgaacttcaggaagaagtcgggattaccccccaacattttagcctatttgaaaaactggaatatgaattcccggacaggcatataacactgtggttttggctggtcgaacgctgggaaggggagccgtggggtaaagaagggcaacccggtgagtggatgagcctggtcggtcttaatgccgatgattttccgccagccaatgaaccggtaattgcgaagcttaaacgtctgtaagtcagataaggcgttttcgccgcatccgacattcgcacacgatgcctgatgcgacgctggcgcgtcttatcaggcctaaagggatttctaactcattgataaatttgtttttgtaggtcggataaggcgttcacgccgcatccgacatttgcacaagatgcctgatgcgacgctgtccgcgtcttatcaggcctacgtgcggcatcagacaaatgtcactgctttggttcttcgctccagtcatcgctttcggaaagatcgccactgctggggattcgtttttcttcagcagcccattctccgaggtcgatcagctgacaacgtttggagcaaaatggccgaaacgggctgatttcaccccacaccaccgttttcccgcaggttgggcaattcaccgtaatagtttcactcatttttactccttagcaacaggccagttcgaaatccagacgttccggtacctgtccgttttcagtgtccagcggcataaaacgaatggcaaaacggctcttatgtccggaaatttgcggataaagctgactatcgaggctcagattcaggcgcagcaagtcggcatcgccaccgttatcctgataaaaaccattcaggctggtttgtttacggaagggggcgctctggcgaattaaatccagcaccatggtaagtgcctgggtgagcgggttcaggctggcaatccaggtttctacctggctgtcgcgctgcgcctggggtagatgcagccaaatgtgcaatgtaggtaaatcaaagctgcaacagccgcctgggatgctcagtcgctgacgcaccagagcaatcaaacgatcttcacgcagaaattgcccgatacgcggcgcggaaattaatacgctccccgccgcttttaactgctgaattaatgcttcaatacggctctggtccacgccaggcacgccaatccaggtctggagtttacgttgctgccggtcaagttctttcaacagctcagtgcggacttcgccgcgctcgaaaacatccagtaattcactgacattacggaagaaatgcagcgcgccagcgtggtcaacgatgggtaaattaacggtgagttgctgaatcaaaaactcaatgcgcagccatgtacgcattttttcatttagtggatgttcaaaaaggacctgggtctgcattacggtttttcctgactgacaaactggctcgcaagctgcaaatagtgtgcgtgcaggcgggcaacatcgcttgcgatagcatccggtgcgccgttattatcaatgacgtcatctgccacggcaaggcgggcttcgcgcgttgcctgagcagcaaggatttgttcgacatgctcgcgagttacatcatcgcgctgcatggtgcgcttaagttgcgtttctgggctgacatccaccacaagcactcgattcgcttttttatacagactgttttctaccagcaatggcacaacccacagtacatagggggaagtagcttgctggatctggtgttgcgtctcttgctgaatcagcggatgcagcagggcgttaagccagtttttctcttccgggttggcgaagatccgctcgcgcaaggcccggcgctgcaatgttccatcagcagcaatcatgttagcgccaaagtgatcagcaatggcatgtagcgcaggtgcacctggttcaaccacctgacgcgcaataatatcggcatcaatgacgttaattccgagatcagcaaacgcattggcaacggtactcttgccactgccaatgcctcccgttaaggcaactatatacctcataatttatattcccgggaattcatcatgattatcaaaacgttaaaaatgagtgcacgaaagcgaaattgatgaaacgttcgctcactatttaccaggtaaatttatgggattgtagcgtaaaaaaagacaatttcgcagtcttgcgccgcattgattagtgcgtatgatagcgtcactggagttgcgctcttacccttatagccattaaccccaggaatccgcacatgcgtattgaagaagatctgaagttaggttttaaagacgttctcatccgccctaaacgctccactcttaaaagccgttccgatgttgaactggaacgtcaattcaccttcaaacatagtggtcagagctggtccggcgtgccgattatcgccgcaaatatggacaccgtaggcacattttctatggcctctgcgctggcttcttttgatattttgactgctgtgcataaacactattctgtcgaagagtggcaagcgtttatcaacaattcttccgctgatgtgctgaaacatgtgatggtttctaccggtacgtctgatgcggatttcgaaaaaactaaacagattctcgacctgaacccggcattaaacttcgtttgtattgacgtggcgaatggttattccgaacacttcgtgcagttcgttgcgaaagcgcgtgaagcgtggccgaccaaaaccatttgtgctggtaacgtagtgactggtgaaatgtgtgaggagcttatcctcagtggtgccgatatcgttaaagttggcattggcccaggttctgtttgtacaactcgcgtcaaaacaggcgtcggttatccgcaactttctgcggtaatcgaatgtgccgatgctgcgcacggtctgggcggaatgatcgtcagcgatggtggctgcaccacgccgggcgatgtggcgaaagcctttggcggcggtgccgatttcgtcatgcttggcggcatgctggcgggccacgaagagagcggcggtcgcatcgttgaggagaacggcgagaaatttatgctgttctacggcatgagctccgagtctgcgatgaaacgtcacgttggcggcgttgcggaatatcgcgcagcagaaggtaaaaccgttaagctgccgctgcgaggcccggttgaaaataccgcgcgagatattttgggcggcctgcgtagtgcttgtacatacgttggggctagtcgcctgaaagagctgaccaagcgcaccacgtttattcgtgtgcaggaacaagaaaaccgcatcttcaacaacctgtaatctcccaacgctggcgtggagcaacacgccagcgttatcccatcccactcatcgcatcgcctaaatggaaaattggcagatacattgccaccaccagcgtaccaataattcctcccgttatgatcagcaacgccggttccagtaaggctgcgaggttatccgccagcgccattgtgttttcccgatgatgatgggcgaggttgtctaacatgagatccagagagccggatgcctctcctgttctcactaattgcaaacagagcgggctaaactcaccggtattttttagcgccagccagatgggttgaccgttactgatatcgtgctggatttgtgtcagaagttgcacccagtacgggcagcgcattgtttctctgacgctctctacgccctgtaaaaaagtaatgcctgcactttgtgtcagcgccagaatcgtaaagatctgcgtgagtttttgtccccgcatcagactacccataatcgggatgcgtaacagcaatttctgccgcactataagccaggtcggtcggcgcatcagcaacttattggctatcgccagcagaaagccgaacaacaccagcagccagctccattcgccactaaagtctgccagcgtcatgatcccctgcgttagtgccggtagtggggtgttgaaggtcttatagatagcggcaaactccggcagaacaaaatgcagcattgccacaaccaccatgattgccatcgctaaaatgatgatgggataacgtaacgcacttttcactttgtcggtcaactgacgctgggctttttgctgacgcgccagttcaaagcagcattcatccagcttaccggtcagttcacccgtgcggatcatcgcctgatagagcggcggaaatacctcactccagggtaataaggcattggaaaaagcaatgccctgttcgagatcgtgcgccaggctttgcagcaacgcttgccattgcttactgggatgctgttccgccagcagagccagcccttcagaaagcgttaaccctgctttgagtagcgtcgccagttgatgaatgacttccgcgcttttatctcctcgccactgcgcagaattgatggcgattcgcttcaggcttagtggggtaaccatctgttgctgtagtgccataagcagtaaagtacggctctctgcccatagcatcccatcttgcgcattgccgtcgccggttatgccatgccagcgccagagttgcttactcgccatgcggcatcctcagtacgcggattaactcttcaaaggtggttaagccttgctctacggccaggcagccgttttcaaaaagcgtacgcatacccgcctgtcgtgcgtgcgtttccaggctttcaacgtcggtattagcggaaataagctgacgaatgaccggcgttatgggcagaacttcaaataaggccgtacgaccataaaaaccgtggtagcaatgtacacaaccgggtgcctgccagtggggcagcgggcttggccatacattgtctggaatgtggatgggctccccttgctgccggcgacaatgtgggcaaagtttgcgtaccagacgctgggctattaccagcgtaagcgcgctacttagcatccagcgggcgacccccatttgctgtaaacgtaccagcgtttcgcaggtggaattagtgtgtagggtagacaacaccaggtgaccagtttgcgccgctttaatagcgatctctgctgtttcgccatcgcggatctctccgatcatgatgacgtcaggatcctggcgcaataacgcacgcaaaacgccctgaaaggtgagtccggcacgcggatggatttgcgtctggtttagtccggctatggggatctcaactggatcttcgacgctacaaatattaatgtcagcggtattcagcttttgcagggcactataaagcgtgaccgttttgccgctgccggtagggccagttaccagcaccagtccctgtggttgttgcaaggcatgagcaaagtccgccagttgtaacggctgcattccaagcgtgttgacatccagtgcctgacccacctgctgtaacaaccttaataccaccttttcaccaccccgacatggtaaggtcgcaatacgaaaactgacggcgtttcctgccagttcgacagtgaattgcccgtcctgcggcaggcgatgttccgcaatatccaggtttcccagcacttttaatctggcggttaatgcgactccggcatccggactaacatccggtaaaggatgcaatacgccgtcgatacgcaagcggatgcggtaggcattgtccgctggttcgatatgaatatcagacgcgcgttgttccagcgcagattgtaacgttcgagttagcaactctgctttgggctgatgcttctcctgaacagctacgggcagtgtctgttgtgtgcgactggcgtgaccttccatttgttggcgcgtccagcaggtgatctcaatacgtttggtggtagcgaaatgcaatgcgtccagtagctcatggctaggtgcatcgactaccgcaacatgaaccacctcttcgctggcatccagcaagactccatgataacgcagacacagggcagtgagctgtggaatattcattgccgctccttagttggcgtcatcaaagcggaagacatcttcgcaggcttgctgcaatgcgctgtcactttgaatattgcagttgcgcgtccagccggtgacgccgtttgcgttatcccaacccggtgtcatgacgacgcttagcccattgagactttcttgcccggtcaggctcaccacgccctttgccacactcatggcactaacatagcgggtggtggtagggctgggaatgccattgctgccaccgtcgcaggtatctaatccaccatgttccagcgcgcacaactctacggcggtacggtaaggcacaaaggtttgtagcatgtcggtgagtgcggctttgcgcaggtagttttgataagcgggaataccaatggcgcttaaaatggcaatgatgccaataaccaccatcagttcgataagtgtaaaaccgcgttgcttgtccatctgtttcgctccttgatttggttggcgctactttggcaaacgccatcagcacaggcgaggggcaaaaaacgaaacgggaaagcagattccgaggttttttatttcgttgcagcgaaagacaagaaatttgcgaggcgttacgaagaaagttggggaaggggagattatccgcccgcgatggagcggataaatctgtcaactattagcgaaaacgcatactaaggtcgagtgcttgtacgtgtttagttagcgcaccgacggagataaagtccacgcccgtttcggcaaattcacgcagtgttttgtcagtgacgttgccagacacttccagtagcgccttgccgttggtgcgtttgacggcttcgcgcatctgttctgtttcgaagttatccagcatgatgatatcggctcctgctttcagggcttcatcaagttcttccagattctctacttcgacttctactggcgcatccgggtgcagccaggacgctttttcgaccgcctggcgcacactgccggaggcaataatatggttttctttgatcaggaaggcatcagaaagccccagacggtgattcgctccgccgccgcaaagtaccgcgtatttcagagcactacgcaggccgggtaaggttttgcgcgtatccaacaactgcgtgttggtgccttccagcaattcgacatagtggcgtaccttactggcaactccactaagggtttgcacaaaattaagcgcagtgcgttcgcccgttaacagcacgcgggatgggccttcaagttcgaacaaggattgattggcattgatgacatcgccgtcatccacatgccagattatggtgacatcgtcgcctgccagttgaataaacacctcttcaacccagcgtttgccgcaaaagacgccattctcgcgggtgatcaccgtggcatgagagcgagaattttccggtaaaagttttgccgtaatatcattgttggcatcgactgttccgcctaaatcttcccgcagcgcctgggccaccgcgccggggatatcgagattaatgcgttccagcagctcgtcacgtcgggtgtcagggttatagcggcgaggcggcatgttaaaactccagatagctaacgaatcataaggtagaaacatgctactctgaaccgggtattagcaccacatataaggagatcctgcatgttgttagaacaggggtggctggttggcgcgcgccgcgttcccagtccacattacgattgccgcccggatgacgaaacacccaccctgctggtggtgcacaatattagcctgccgccaggcgagtttggcggtccgtggatcgacgcattattcactggaactattgatccgcaggcacatcctttctttgctgagatcgcccatttgcgcgtctccgctcactgtttgattcgccgtgatggtgaaatagtccagtatgttcctttcgataaacgtgcatggcatgcgggagcctctcagtatcaggggcgcgaacgctgcaatgatttttctattgggattgagcttgaaggcaccgatacgctggcgtataccgatgcgcagtatcaacagcttgcggcggttacgcgggcactgattgattgctatccggatatcgctaaaaacatgacgggccattgtgatattgcgccggatcggaaaaccgatcccggtcctgcatttgattgggcacggtttcgtgtgctggtcagcaaggagacaacatgacgctatttacaaccttactggtgttaattttcgagcgcctgtttaagttgggcgagcactggcagcttgatcatcgtcttgaagcgttctttcggcgggtgaaacatttttctctcgggcgcacgttaggcatgaccattattgcgatgggcgtgacttttttactgttacgcgcattgcagggagtattgttcaacgttcccacgctactggtgtggctgctgattggtttgctgtgtattggcgcaggtaaagttcgtcttcattatcatgcttatctgacagctgctagtcgtaatgatagccatgcccgtgccacgatggctggcgaactcaccatgattcacggcgtcccggcaggctgcgacgaacgtgagtatttgcgtgagctgcaaaatgcattgctgtggattaactttcgtttttatcttgcaccgctgttctggctgattgtggggggaacctggggacccgttacgctgatggggtatgcgtttttgcgtgcatggcaatactggctggcgcgatatcagacgccgcatcatcgtttacagtccggcattgatgccgtgcttcatgtactggattgggtgccggttcgtcttgcgggtgtggtatatgccttgatcggtcatggtgagaaagcgttaccggcctggtttgctagcctgggtgatttccatactagccagtatcaggtgttaacgcgtctggcgcagttctctctggcgcgtgaaccgcatgtcgataaggtggagacgccgaaggcagcggttagtatggcgaagaaaaccagcttcgtggtcgtggtggtgattgcactactgacgatttacggggcgttggtgtaaagattattgccctcaccctgtacgggtgagggcgtagagagattaatgcgcttttacggctttggcggttttctctttaaacagatagccgatacctaacacgatcagccataccgggatcaggtatacgctaatcgccattcctggggtcatcagcataatcaccagtaccgccgccataaacagcaggcagatccagttacccagcggataaagcagagcagggaagcgagttaccacgccttgttcctgcttggcgcgacggaatttcatatgcgccaggctaatcatcgcccagttgattaccagtgcagataccaccagcgccattaacagtccgaaagcggactctggggcaaggtagttaatcagtacgcacaacgccgttaccagtgcagacaccagaatggtatttactggtacaccacgtttatcgacagacgccagcgcttttggcgcattaccctgttgtgccagaccaaacagcatacggctgttgcaatatacgcagctgttgtacacggagagcgccgcagtcagtaccacgatgttcagcgcattcgccacaaaggtatcgcctaactcgtggaagatcagcacaaacggactggtatcggcggtaacgcgggtccacggcatcagactgagcagaacggctaagctaccaatatagaaaatcaggatgcggtagataacctggttagttgctttcggtatactttgctccgggttatcagcttctgctgcggtgatccccaccagttccagaccaccgaagctgaacatgataatcgccatcatcatcaccagcccggtgaagccgtgcggcaggaaaccaccctgatcccacaggttgctaacggtcgcctgcgggccgccgttgccactgaatagcagccagccgccgaagatgatcatcgctaccaccgcgataactttgataatggcaaaccagaactccatctcgccaaacactttaacgttggtcaggttgatggcgttaatcaccacaaagaatacggcggcagaaacccaggtggggatttccggataccagaactgaatgtatttacccacggcagtcagctcagccatggcaactaaaacgtacagtacccagtagttccagccagaggcgaaaccggcaaaactgccccagtatttataagcaaagtggctaaaggagcctgcgacaggttcttcgaccaccatttcacccagctgacgcatgatcagaaaggcgataaaaccagcaatggcgtaacccaggataatccctggccctgcggactgtattacggaggcgctacccaggaataacccggtccctatcgcgccacccagcgcgataagctgaatatggcggtttttaaggccgcgctttagctgctcgccgtgctgttgaccttccatcatgaaacctcgtgcggtggttgtttttttgatctacgcagtgatgcgtgtgtaagtttgcaattccgtttgttgtattaatttgtttacatcaaagaagtttgaattgttacaaaaagacttccgtcagatcaagaataatggtatgcggcagcgaatgcacccgctttatgcatggttgaagatgagttgcttaaaaagaaaccgtttgtaaagctcagcctcaacccctctcaatatgtagaatgaatttaaattcgttttaattgaattaaaaatcacaaaattggtaagtgaatcggttcaattcggatttttatagtttaataatcgttaaaaaactcctttcctacgtaaagtctacatttgtgcatagttacaactttgaaacgttatatatgtcaagttgttaaaatgtgcacagtttcatgatttcaatcaaaacctgtatggacataaggtgaatactttgttactttagcgtcacagacatgaaattggtaagaccaattgacttcggcaagtggcttaagacaggaactcatggcctacagcaaaatccgccaaccaaaactctccgatgtgattgagcagcaactggagtttttgatcctcgaaggcactctccgcccgggcgaaaaactcccaccggaacgcgaactggcaaaacagtttgacgtctcccgtccctccttgcgtgaggcgattcaacgtctcgaagcgaagggcttgttgcttcgtcgccagggtggcggcacttttgtccagagcagcctatggcaaagcttcagcgatccgctggtggagctgctctccgaccatcctgagagtcagtatgacttgctcgaaacacgacacgccctggaaggtatcgccgcttattacgccgcgctgcgtagtaccgatgaagacaaggaacgcatccgtgaactccaccacgccatagagctggcgcagcagtctggcgatctggacgcggaaagtaacgccgtactccagtatcagattgccgtcaccgaagcggcccacaatgtggttctgcttcatctgctaaggtgtatggagccgatgttggcccagaatgtccgccagaacttcgaattgctctatagccgtcgcgagatgctgccgctggtgagtagtcaccgcacccgcatatttgaagcgattatggccggtaagccggaagaagcgcgcgaagcaagccatcgccatctggcctttatcgaagaaattttgctcgacagaagtcgtgaagagagccgccgtgagcgttctctgcgtcgtctggagcaacgaaagaattaatgatttttctggtaaaaattatccagaagatgttgtaaatcaagcgcatataaaagcgcggcaactaaacgtagaacctgtcttattgagctttccggcgagagttcaatgggacaggttccagaaaactcaacgttattagatagataaggaataacccatgagtgaacgtttcccaaatgacgtggatccgatcgaaactcgcgactggctccaggcgatcgaaagcgtcatccgtgaagaaggtgttgagcgtgctcagtatctgatcgaccaactgcttgctgaagcccgcaaaggcggtgtaaacgtagccgcaggcacaggtatcagcaactacatcaacaccatccccgttgaagaacaaccggagtatccgggtaatctggaactggaacgccgtattcgtagtgctatccgctggaacgccatcatgacggtgctgcgtgcgagcaaaaaagacctcgaactgggcggccatatggcgtccttccagtcttccgcaaccatttatgatgtgtgctttaaccacttcttccgtgcacgcaacgagcaggatggcggcgacctggtttacttccagggccacatctccccgggcgtgtacgctcgtgctttcctggaaggtcgtctgactcaggagcagctggataacttccgtcaggaagttcacggcaatggcctctcttcctatccgcacccgaaactgatgccggaattctggcagttcccgaccgtatctatgggtctgggtccgattggtgctatttaccaggctaaattcctgaaatatctggaacaccgtggcctgaaagatacctctaaacaaaccgtttacgcgttcctcggtgacggtgaaatggacgaaccggaatccaaaggtgcgatcaccatcgctacccgtgaaaaactggataacctggtcttcgttatcaactgtaacctgcagcgtcttgacggcccggtcaccggtaacggcaagatcatcaacgaactggaaggcatcttcgaaggtgctggctggaacgtgatcaaagtgatgtggggtagccgttgggatgaactgctgcgtaaggataccagcggtaaactgatccagctgatgaacgaaaccgttgacggcgactaccagaccttcaaaagcaaagatggtgcgtacgttcgtgaacacttcttcggtaaatatcctgaaaccgcagcactggttgcagactggactgacgagcagatctgggcactgaaccgtggtggtcacgatccgaagaaaatctacgctgcattcaagaaagcgcaggaaaccaaaggcaaagcgacagtaatccttgctcataccattaaaggttacggcatgggcgacgcggctgaaggtaaaaacatcgcgcaccaggttaagaaaatgaacatggacggtgtgcgtcatatccgcgaccgtttcaatgtgccggtgtctgatgcagatatcgaaaaactgccgtacatcaccttcccggaaggttctgaagagcatacctatctgcacgctcagcgtcagaaactgcacggttatctgccaagccgtcagccgaacttcaccgagaagcttgagctgccgagcctgcaagacttcggcgcgctgttggaagagcagagcaaagagatctctaccactatcgctttcgttcgtgctctgaacgtgatgctgaagaacaagagcatcaaagatcgtctggtaccgatcatcgccgacgaagcgcgtactttcggtatggaaggtctgttccgtcagattggtatttacagcccgaacggtcagcagtacaccccgcaggaccgcgagcaggttgcttactataaagaagacgagaaaggtcagattctgcaggaagggatcaacgagctgggcgcaggttgttcctggctggcagcggcgacctcttacagcaccaacaatctgccgatgatcccgttctacatctattacagcatgttcggcttccagcgtattggcgatctgtgctgggcggctggcgaccagcaagcgcgtggcttcctgatcggcggtacttccggtcgtaccaccctgaacggcgaaggtctgcagcacgaagatggtcacagccacattcagagcctgactatcccgaactgtatctcttacgacccggcttacgcttacgaagttgctgtcatcatgcatgacggtctggagcgtatgtacggtgaaaaacaagagaacgtttactactacatcactacgctgaacgaaaactaccacatgccggcaatgccggaaggtgctgaggaaggtatccgtaaaggtatctacaaactcgaaactattgaaggtagcaaaggtaaagttcagctgctcggctccggttctatcctgcgtcacgtccgtgaagcagctgagatcctggcgaaagattacggcgtaggttctgacgtttatagcgtgacctccttcaccgagctggcgcgtgatggtcaggattgtgaacgctggaacatgctgcacccgctggaaactccgcgcgttccgtatatcgctcaggtgatgaacgacgctccggcagtggcatctaccgactatatgaaactgttcgctgagcaggtccgtacttacgtaccggctgacgactaccgcgtactgggtactgatggcttcggtcgttccgacagccgtgagaacctgcgtcaccacttcgaagttgatgcttcttatgtcgtggttgcggcgctgggcgaactggctaaacgtggcgaaatcgataagaaagtggttgctgacgcaatcgccaaattcaacatcgatgcagataaagttaacccgcgtctggcgtaagaggtaaaagaataatggctatcgaaatcaaagtaccggacatcggggctgatgaagttgaaatcaccgagatcctggtcaaagtgggcgacaaagttgaagccgaacagagcctgatcaccgtagaaggcgacaaagcctctatggaagttccgtctccgcaggcgggtatcgttaaagagatcaaagtctctgttggcgataaaacccagaccggcgcactgattatgattttcgattccgccgacggtgcagcagacgctgcacctgctcaggcagaagagaagaaagaagcagctccggcagcagcaccagcggctgcggcggcaaaagacgttaacgttccggatatcggcagcgacgaagttgaagtgaccgaaatcctggtgaaagttggcgataaagttgaagctgaacagagcctgatcaccgtagaaggcgacaaggcttctatggaagttccggctccgtttgctggcaccgtgaaagagatcaaagtgaacgtgggtgacaaagtgtctaccggcagcctgattatggtcttcgaagtcgcgggtgaagcaggcgcggcagctccggccgctaaacaggaagcagctccggcagcggcccctgcaccagcggctggcgtgaaagaagttaacgttccggatatcggcggtgacgaagttgaagtgactgaagtgatggtgaaagtgggcgacaaagttgccgctgaacagagtctgatcaccgtagaaggcgacaaagcttctatggaagttccggcgccgtttgcaggcgtcgtgaaggaactgaaagtcaacgttggcgataaagtgaaaactggcagcctgattatgatcttcgaagttgaaggcgcagcgcctgcggcagctcctgcgaaacaggaagcggcagcgccggcaccggcagcaaaagctgaagccccggcagcagcaccagctgcgaaagcggaaggcaaatctgaatttgctgaaaacgacgcttatgttcacgcgactccgctgatccgccgtctggcacgcgagtttggtgttaaccttgcgaaagtgaagggcactggccgtaaaggtcgtatcctgcgcgaagacgttcaggcttacgtgaaagaagctatcaaacgtgcagaagcagctccggcagcgactggcggtggtatccctggcatgctgccgtggccgaaggtggacttcagcaagtttggtgaaatcgaagaagtggaactgggccgcatccagaaaatctctggtgcgaacctgagccgtaactgggtaatgatcccgcatgttactcacttcgacaaaaccgatatcaccgagttggaagcgttccgtaaacagcagaacgaagaagcggcgaaacgtaagctggatgtgaagatcaccccggttgtcttcatcatgaaagccgttgctgcagctcttgagcagatgcctcgcttcaatagtagcctgagcgaagacggtcagcgtctgaccctgaagaaatacatcaacatcggtgtggcggtggataccccgaacggtctggttgttccggtattcaaagacgtcaacaagaaaggcatcatcgagctgtctcgcgagctgatgactatttctaagaaagcgcgtgacggtaagctgactgcgggcgaaatgcagggcggttgcttcaccatctccagcatcggcggcctgggtactacccacttcgcgccgattgtgaacgcgccggaagtggctatcctcggcgtttccaagtccgcgatggagccggtgtggaatggtaaagagttcgtgccgcgtctgatgctgccgatttctctctccttcgaccaccgcgtgatcgacggtgctgatggtgcccgtttcattaccatcattaacaacacgctgtctgacattcgccgtctggtgatgtaagtaaaagagccggcccaacggccggcttttttctggtaatctcatgaatgtattgaggttattagcgaatagacaaatcggttgccgtttgttgtttaaaaattgttaacaattttgtaaaataccgacggatagaacgacccggtggtggttagggtattacttcacataccctatggatttctgggtgcagcaaggtagcaagcgccagaatccccaggagcttacataagtaagtgactggggtgagggcgtgaagctaacgccgctgcggcctgaaagacgacgggtatgaccgccggagataaatatatagaggtcatgatgagtactgaaatcaaaactcaggtcgtggtacttggggcaggccccgcaggttactccgctgccttccgttgcgctgatttaggtctggaaaccgtaatcgtagaacgttacaacacccttggcggtgtttgcctgaacgtcggctgtatcccttctaaagcactgctgcacgtagcaaaagttatcgaagaagccaaagcgctggctgaacacggtatcgtcttcggcgaaccgaaaaccgatatcgacaagattcgtacctggaaagagaaagtgatcaatcagctgaccggtggtctggctggtatggcgaaaggccgcaaagtcaaagtggtcaacggtctgggtaaattcaccggggctaacaccctggaagttgaaggtgagaacggcaaaaccgtgatcaacttcgacaacgcgatcattgcagcgggttctcgcccgatccaactgccgtttattccgcatgaagatccgcgtatctgggactccactgacgcgctggaactgaaagaagtaccagaacgcctgctggtaatgggtggcggtatcatcggtctggaaatgggcaccgtttaccacgcgctgggtagtcagattgacgtggttgaaatgttcgaccaggttatcccggcagctgacaaagacatcgttaaagtcttcaccaagcgtatcagcaagaaattcaacctgatgctggaaaccaaagttaccgccgttgaagcgaaagaagacggcatttatgtgacgatggaaggcaaaaaagcacccgctgaaccgcagcgttacgacgccgtgctggtagcgattggtcgtgtgccgaacggtaaaaacctcgacgcaggcaaagcaggcgtggaagttgacgaccgtggtttcatccgcgttgacaaacagctgcgtaccaacgtaccgcacatctttgctatcggcgatatcgtcggtcaaccgatgctggcacacaaaggtgttcacgaaggtcacgttgccgctgaagttatcgccggtaagaaacactacttcgatccgaaagttatcccgtccatcgcctataccgaaccagaagttgcatgggtgggtctgactgagaaagaagcgaaagagaaaggcatcagctatgaaaccgccaccttcccgtgggctgcttctggtcgtgctatcgcttccgactgcgcagacggtatgaccaagctgattttcgacaaagaatctcaccgtgtgatcggtggtgcgattgtcggtactaacggcggcgagctgctgggtgaaatcggcctggcaatcgaaatgggttgtgatgctgaagacatcgcactgaccatccacgcgcacccgactctgcacgagtctgtgggcctggcggcagaagtgttcgaaggtagcattaccgacctgccgaacccgaaagcgaagaagaagtaatttttcgtttgccggaacatccggcaattaaaaaagcggctaaccacgccgctttttttacgtctgcaatttacctttccagtcttcttgctccacgttcagagagacgttcgcatactgcactccgttgctcgttattcagcctgacagtatggttactgtcgtttagacgttgtgggcggctctcctgaactttctcccgaaaaacctgacgttgttcaggacttgcgctttgaacacgctggcgggcgttatcacgttgctgttgattcagtgggcgctgctgtactttttccttaaacacctggcgctgctctggacttgcggactgaatacgctcacgcgctgcgtctcttcgctgctggttctgcgggttagtctgcattttctcgcgaaccgcctggcgctgctcagggctggcggactgaatgcgctcacgcgctgcctctcttcgctgctggatcttcgggttagtctgcattctctcgcgaactgcctggcgctgctcagggctggcggactgataacgctgacgagcggcgtccttttgttgctgggtcagtggttggcgacggctgaagtcgtggaagtcgtcatagctcccatagtgttcagcttcattaaaccgctgtgccgctgcctgacgttgggtatctcgtgtaatgactggtgcggcgtgtgttcgttgctgaaactgatttgctgccgcctgacgctggctgtcgcgcgttggggcaggtaattgcgtggcgctcattccgccgttgacatcggtttgatgaaaccgctttgccatatcctgatcatgatagggcacaccattacggtagtttggattgtgccgccatgccatattcttatcagtaagatgctcaccggtgatacggttgaaattgttgacgtcgatattgatgttgtcgccgttgtgttgccagccattaccgtcacgatgaccgccatcgtggtgatgataatcatcattgtcatgatgatgatggtcatgatcgtcgtcgtcccagtcgatgctgctgaatagtgcgtacgtggtagcaacgcccatgctatagccgaatccgcgtacaaagctgtcaacaaacggttctccggctggtggtggcagataaaccggcggatacgcagtattggcccagttcccgtaaaccacggttgggttgtagttgggaatatagaccacatcaggattggcgggctcaatggaaatgacggttgttgccggctctgtaatgacggggttggcagttaaaactgtattggatggtatgacgggtgccgtgactgtctgttttaccggtacagctttcttcgttgtggtaataactttctgttcggtactactcttcaggctgccggtttgttgcgccagttgccgcaatcgctgtacgctgtccatcacgtcctgcggctgggccagaaaagcatcgcccaggttttgcacccattgcgggttttcgcccatcaatgccatcaattgtggaaaggccaccagacttttaacgctggcgtcccacggctggtcagataccgcctgaatagcagcatcgccttgtttaagtggattatcgtggctccattgcactgcttgagcaacgtttgtcggataggtacttgccatcagcacctggctaagtagggcgtcgggatacagcgcgacgggcgcgacccattgatctatttgtgcagtgctgaatgcggatttgacgacggcgggtgttacgggaggtgcggaaaccgttgcaggaaacgtaaccgcggcagcgtcagacacagccagttgtgtgctttgcggttccacaggcgcttccactgtgcggctttttatatatagcccggtagaggcggcacaaagcccggcactgcaaattagcgccagcacatggggtttaaacggcaaagtcattttcataattcggatctcaaggaaatcgcaatggtcggcgaactgccacccgcaggtgctgtgaatccgagtataaagaggcggtagtttaaattttgactaatcttgggattcgttgagaaaggtgattatcaccatgcgaattaacgaagtttttacggagggaaacaatctctagaccatccttaacgattcagccacttttttatgttgcttttttgtaaacagattaacacctcgtcaaaatcctgctattctgcccgttgcggtactgggcatttaccctacaaactgctgtctcacaggagcgtgaagagaatcgcctgccgcactatgacaatgagagcgaggagaaccgtcgtgctagaagaataccgtaagcacgtagctgagcgtgccgctgaggggattgcgcccaaacccctggatgcaaaccaaatggccgcacttgtagagctgctgaaaaacccgcccgcgggcgaagaagaattcctgttagatctgttaaccaaccgtgttcccccaggcgtcgatgaagccgcctatgtcaaagcaggcttcctggctgctatcgcgaaaggcgaagccaaatcccctctgctgactccggaaaaagccatcgaactgctgggcaccatgcagggtggttacaacattcatccgctgatcgacgcgctggatgatgccaaactggcacctattgctgccaaagcactttctcacacgctgctgatgttcgataacttctatgacgtagaagagaaagcgaaagcaggcaacgaatatgcgaagcaggttatgcagtcctgggcggatgccgaatggttcctgaatcgcccggcgctggctgaaaaactgaccgttactgtcttcaaagtcactggcgaaactaacaccgatgacctttctccggcaccggatgcgtggagtcgcccggatatcccactgcacgcgctggcgatgctgaaaaacgcccgtgaaggtattgagccagaccagcctggtgttgttggtccgatcaagcaaatcgaagctctgcaacagaaaggtttcccgctggcgtacgtcggtgacgttgtgggtacgggttctagccgtaaatccgccactaactccgttctgtggtttatgggcgatgatattccacatgtgccgaacaaacgcggcggtggtttgtgcctcggcggtaaaattgcacccatcttctttaacacgatggaagacgcgggtgcactgccaatcgaagtcgacgtctctaacctgaacatgggcgacgtgattgacgtttacccgtacaaaggtgaagtgcgtaaccacgaaaccggcgaactgctggcgaccttcgaactgaaaaccgacgtgctgattgatgaagtgcgtgctggtggccgtattccgctgattatcgggcgtggcctgaccaccaaagcgcgtgaagcacttggtctgccgcacagtgatgtgttccgtcaggcgaaagatgtcgctgagagcgatcgcggcttcagcctggcgcaaaaaatggtaggccgtgcctgtggcgtgaaaggcattcgtccgggcgcgtactgtgaaccgaaaatgacttctgtaggttcccaggacaccaccggcccgatgacccgtgatgaactgaaagacctggcgtgcctgggcttcagcgctgacctggtgatgcagtctttctgccacaccgcggcgtatccgaagccagttgacgtgaacacgcaccacacgctgccggacttcattatgaaccgtggcggtgtgagcctgcgtccgggtgacggcgtcattcactcctggctgaaccgtatgctgctgccggataccgtcggtaccggtggtgactcccatacccgtttcccgatcggtatctctttcccggcgggttctggtctggtggcgtttgctgccgcaactggcgtaatgccgcttgatatgccggaatccgttctggtgcgcttcaaaggcaaaatgcagccgggcatcaccctgcgcgatctggtacacgctattccgctgtatgcgatcaaacaaggtctgctgaccgttgagaagaaaggcaagaaaaacatcttctctggccgcatcctggaaattgaaggtctgccggatctgaaagttgagcaggcctttgagctaaccgatgcgtccgccgagcgttctgccgctggttgtaccatcaagctgaacaaagaaccgatcatcgaatacctgaactctaacatcgtcctgctgaagtggatgatcgcggaaggttacggcgatcgtcgtaccctggaacgtcgtattcagggcatggaaaaatggctggcgaatcctgagctgctggaagccgatgcagatgcggaatacgcggcagtgatcgacatcgatctggcggatattaaagagccaatcctgtgtgctccgaacgacccggatgacgcgcgtccgctgtctgcggtacagggtgagaagatcgacgaagtgtttatcggttcctgcatgaccaacatcggtcacttccgtgctgcgggtaaactgctggatgcgcataaaggtcagttgccgacccgcctgtgggtggcaccgccaacccgtatggacgccgcacagttgaccgaagaaggctactacagcgtcttcggtaagagtggtgcgcgtatcgagatccctggctgttccctgtgtatgggtaaccaggcgcgtgtggcggacggtgcaacggtggtttccacctctacccgtaacttcccgaaccgtctgggtactggcgcgaatgtcttcctggcttctgcggaactggcggctgttgcggcgctgattggcaaactgccgacgccggaagagtaccagacctacgtggcgcaggtagataaaacagccgttgatacttaccgttatctgaacttcaaccagctttctcagtacaccgagaaagccgatggggtgattttccagactgcggtttaaaaagtcagcgcacgcgctgcgcataaacgacacaatgcccggtgaatgagattcccgggcatttttttatttctaaaccatcgccgttccgctgtttttctccggtaaggctgcgataattacatcaatggcgcaatgcgatttcggtgcattgccgggagcagaggaacacactatggattacgaatttctgcgcgatattaccggagtggtaaaggtgcgtatgtccatggggcatgaagtggtcgggcactggtttaatgaagaggtgaaagaaaacctggccttgcttgatgaagtggaacaagcagcgcacgcactgaaaggtagcgaacggtcctggcaacgggcagggcatgaatacaccctgtggatggacggtgaagaggtgatggttcgcgccaatcaactggaattcgctggcgatgaaatggaagaggggatgaactactacgacgaagaaagcctgagcctatgcggcgttgaggattttctgcaggtcgtggcggcttaccgcaatttcgtgcagcagaagtaaataaatctggcggagcctgggagctccgccagagccgttaaacagctggcatattgcgcccgtaataaatctcgcgcatttctttccacagcgcagcggtaatttcctggcgctcgctgtcggttaagtcttccggtttggtgtggaacatgtagtgcttaaggtcgaactctttaagcaacatcttggtatggaagatattttcctgatagacgttcacatccaccatgtcatacagcgccttcatatcgtcagacataaagttctgaatgctattaatctcatggtcgataaagtgcttcataccgttaatgtcgcgggtaaaaccgcgcacgcgataatcaatggttacgatatcggactcaagctggtggatcaggtaattcagcgccttcagcggagaaatcacgccgcaggtagagacttcaatatcggcgcggaaggtacataaaccgccttcaggatgactttccgggtaggtatgtacgcaaatatgacttttatcaagatgggcaacgaccgtttctggcagtgggccggggtgttctgttttgtcgatgagtttcgggtcaaccggttcttcactcaccagaatagtgacgctggcaccctgtggttcgtaatcctggcgggcgatgttaagaatattagccccgataatggaacaggtttcactcaggatttcggtcagacggttggcattatagagttcatcgatataagcaatataaccgtcgcgctcttcggcagttttggcgtagcagatatcgtaaatacaaaaactcagacttttggtcagattattaaagccatgcagtttcagttttttcaatttcttatcttctccttaggacggctgactagccagtgcgtcttgcagatactgaggtaaggcaaaagctgccgtatggattgccggattgtaataacggcatttcaggccagaggcgagaaaacgcgcctgaataatttcggtactgagatggcgtaaggcgtcgttatctgtcgcccatgcaaaagtcatgataccgccgtaataggtcgggatcgccgcctgataaaagccaacgtcgctgaagtaatggctgagtttgcgatggctgtcgatggcttcttcctgctgtaaaaagcagacgccgttttgtgcgacgaagataccgccaggattcaggcaacgtttgcagccttcataaaatgcgctagtgaaaaggctttcgccgggaccgataggatcggtgcagtcggagataatgacatcaaaggtctggctggtttgattaacgaaattgacgccatcgtcgatcaccagcttaaagcgcggatcgtcgtagctaccggcgttatggttgggtagatactgacggcagaagcttacgacacccgcatcgatttccaccatcgtgatactctcaacgtttttatgtcgggttacttcacgcagcatggcaccgtcgccgccgccgataatcagcacatgtttcgcgtgaccatgggccagtagcggaacatgggtcatcatctcatgatagataaactcgtcgcgctcggtggtttgtactacgccatccagcgccattacgcgaccaaatgcagcgttctcaaaaatgatcagatcctggtgatcggtcttttcatgatacagaacgttatctaccgcaaagtactgcccaaactggtcgtgtagcgtttcatgccactgttttttttcggccatgggttgatacctcctttgttaacacccgtaaaaaaagggcgcaacataatagctaacattgaccgcggatgcacggtcaatatttctacaaaaaggtatcagggattatttgacgtaggcaagcaggcttaaggaatcgcgggccagggctttgcattttttagcgacgggaatgccaatgccgctgagatcgcggtagctgtcttcaccgagggctttcatgtcgaaggtgtcgtaattactgaggtcccactggttttgctgagcgaaaaagaccagtgcgcgacgaatttgcccgttaggtaagttctggtaaccacaatcgttcttcagaaagacaaaaactgccgttaaatcggccatatcttcggcttcagactcgctgagcgcgtaactgtttgcgcagacggccatcaggctgccgaataacactgttctgaaaaacgtcttcattgcttctaccaggggcttaaagaagataaacgttagcacactgcgagcgaggcgacgaccattattgtcgattaaattgtgtctgcggcttgaccttcccgtaaggggaaggactatgctcaacgtttgattttgtttcgcctgcttaagaataaggaaataactatgcaacgtcgtgatttcttaaaatattccgtcgcgctgggtgtggctagcgctttgccgctgtggagccgcgcagtatttgcggcagaacgcccaacgttaccgatccctgatttgctcacgaccgatgcccgtaatcgcattcagttaactattggcgcaggccagtccacctttggcgggaaaactgcaactacctggggctataacggcaatctgctggggccggcggtgaaattacagcgcggcaaagcggtaacggttgatatctacaaccaactgacggaagagacaacgttgcactggcacgggctggaagtaccgggtgaagtcgacggcggcccgcagggaattattccgccaggtggcaagcgcagcgtgacgttgaccgttgatcaacctgccgctacctgctggttccatccgcatcagcacggcaaaaccgggcgacaggtggcgatggggctggctgggctggtggtgattgaagatgacgagatcctgaaattaatgctgccaaaacagtggggtatcgatgatgttccggtgatcgttcaggataagaaatttagcgccgacgggcagattgattatcaactggatgtgatgaccgccgccgtgggctggtttggcgatacgttgctgaccaacggtgcaatctacccgcaacacgctgccccgcgtggttggctgcgcctgcgtttgctcaatggctgtaatgcccgtagcctcaatttcgccaccagcgacaatcgcccgctgtatgtgattgccagcgacggtggtctgctacctgaaccagtgaaggtgagcgaactgccggtgctgatgggcgagcgttttgaagtgctggtggaggttaacgataacaaatcctttgacctggtgacgctgccggtcagccagatggggatggcgattgcgccgtttgataagcctcatccggtaatgcggattcagccgattgctattagtgcctccggtgctttgccagacacattaagtagcctgcctgcgttacctagcctggaagggctgacggtacgcaagctgcaactctctatggacccgatgctcgatatgatggggatgcagatgctaatggagaaatatggcgatcaggcgatggccgggatggatcacagccagatgatgggccatatggggcacggcaatatgaatcatatgaaccacggcgggaagttcgatttccaccatgccaacaaaatcaacggtcaggcgtttgatatgaacaagccgatgtttgcggcggcgaaagggcaatacgaacgttgggttatctctggcgtgggcgacatgatgctgcatccgttccatatccacggcacgcagttccgtatcttgagtgaaaatggcaaaccgccagcggctcatcgcgcgggctggaaagataccgttaaggtagaaggtaatgtcagcgaagtgctggtgaagtttaatcacgatgcaccgaaagaacatgcttatatggcgcactgccatctgctggagcatgaagatacggggatgatgttagggtttacggtataaaaagaccgtattcggaaatatgcccggatctctccgggcattaaactgatgacaaacgcaaatctgcctgatgcgctacgcttatcaggcctacgctagctgtgcaatccattgattttgcacaattttgtaggctggataaggcgttcacgccgcatccggcatgaacaacgcgcacgttgtcagcaatctgagcaagtcttacttcacatcatccggcagcgcataagccacaatatagtcgcccatcttcgtaccaaaactaccgtgaccgcctgcggagatcaccacatactgcttaccattcacttcataggtcattggcgtagcctgaccacccgctggtaaacgaccctgccacagtttttcaccgttgctcatgttgtaagcgcgcaggtagttatctgccgtagcggcgataaacagcacgttacccgccgtggagattggcccgcccagcatcggcatacccatattgaacggcaccggaaccggcatcgggaacggcatactgtcctgcggcgtaccaatacgtttcttccacaccacttcattagttttcagatccagcgcgctgatataaccccatgctggctgtttacatggcagaccaaatggactgaggaacgggttgagcgtgacaccatacggtacaccgtactgtggctgaatgccggattccgtacccgtgcctttggcatctttcggctgctccatcgggttgccaggaccacgcgggatcagtttgctaacaaacggcagtgccattgggttggcaatcgccacttcacgatttggatcaacggaaatcccgccccattcgaacatccccaggttacccgggaagaccagcgtaccctgttcagatggcggggtgaaaatgccttcatagcgcatctggtggaacatcacgcggcacaccagttggtcaaacatggtggctccccacatatccgcaccgctcaaatctttcgtcggacggaagctcagttcagaaaacggttgagttggggttacgtaatcgcctttcgctgcaccttggggaaccggtttttccggtgccggaaccaccagttcgccattacgacgatcgagcacaaaaatgttgccggttttcgccggagcgtaaataactggcactttctgaccattaacggtgatgtccgccagcgtcggctgtgccggaagatccatgtcccacaggtcgtggtgaacggtctggtagctccacgccagtttcccggtagtggcattcagcgccagaatgctgctggcataacgttcctgttccggtgtgcggttaccgccccagatatccggcgtggtcacgcccatcggcagatagaccagatccagcttcgcgtcataggccgctggtgcccaggagtttgggctgttaaaggtaaaggtgtgttcgtcagacgggattgcgttcggatctttcgcgccgggatcaaaagcccacagcagctccccggtgttgacatcaaaaccacggatcacgccagacgtttcgcgggtactgaagttatcggtaacactaccggccatcacgatggttttatcggtgataatcggtgggctagtcggttcatacagacccggtttggtgtctggcatattgctttgcagattgagcacgcctttattggcgaaggtttcgcacagtttgccgttttcagcgttaatcgcaatcagtcgaccatcattgaccggaagaatgatacgacgcgggcaatccgccatcacttccgggctagcggtttctgctttggcttcatgataagagacaccacggcaggttacgtgctggaaagactcgttggttttcagctcaggatcgtaatgccatttctctttgccgctggcggcatcaagcgcaaacaggcgctggtgagcggtacacaggtaaagggtgtcgcccactttaatcggcgtcacttcattggtgatttcacccggatcgttcggctgcttcacatcgccagtacggaacacccaggcttctttcagattatggacgttatcggcgttaatttgtttcagcgggctaaagcgttgaccttcctgattacgaccataggcaggccagtcctgatcggctacgggggagatagcttcagcaggtgtggcatcggcgcttaaggtgccgttgatctcctgcggatcgttaaatccggcccaggtcaggataccaccgctaatcagcagtgcgaccaccagtgcggcaactgcgccgctggcaggaatgaccaggcgacgccagacaaacggcaggatcagccagatgccgaagaagaccagaatgtcgctgcgcggagtcagcgcccagaagtcgaaaccaacttcccagacgccccaaatcatggtgccgagcagcagggctgcgtatagccaaagcgcggcgcgtttactgcgccacagcatccaggcgacgccgagcatcacaaggccagcgatagggtagtaccaggagccgccaatcgcgaccagccagcctccgccaatgagtagatacagcccgcaaagcgctgcaaaaagggctgttagcgtgacgagtaatcgtcggctgcctgtattgttaattgccataaagagacaccatttcaattcattaatattttagtagcaattaattataggttttaacatgtgtgatcgtcatcacaattcgagctttattaacagattccgcgaatgaatagttttactggtatactgcgtgtcttgcgctttgttgcggtgccaaaacctgcccgtgcgaagtgatttgtttttaaatcatatggttagagatatgaaacatactgtagaagtaatgatccccgaagcggagattaaagcgcgtatcgccgaactgggtcgtcagattactgagcgttacaaagacagcggcagcgatatggtgctggtgggtctgctgcgtggcagttttatgtttatggcggacctgtgccgtgaagttcaggtatctcatgaagtcgactttatgaccgcctccagctacggtagcggcatgtccaccacccgtgatgtgaaaatcctcaaagatctggatgaagatatccgtggcaaggacgtgctgattgttgaagatatcatcgacagcgggaatacactgagcaaagtgcgtgagatcttaagcctgcgcgaaccgaagagcctggcgatttgtacgctgctggataaaccgtcccgtcgtgaagtgaacgtcccggtagaatttatcggtttcagcatcccggatgagtttgtggtgggttacggcattgattacgcacagcgttaccgtcatctgccgtatatcggcaaagtgattctgctggacgagtaagtgtgaagttgccggatgtgttgcatccggcatggcatttttatttgtggttggcgtgtttcagcttgaggttggaaatcccgtgacggtaacgttgctcaagggtttcgcggttggtggcggtaacatccagatcacgcagcaagccgtcgtgaatgccgtaggcccagccgtgaatggtaactttctgcccgcgtttccacgcactttgcataatggtggagtggcccaggttatacacctgttccatgacgttcagttcacacaaggtatccagacggcgctcttgcggcatttcgccgagcaaactgctatgtttgaaccagatatcgcggatatgcagcagccagttgttgataagccccagttccgggttttcaactgcggcttgtacgccgccgcaaccgtagtggccacagataataatgtgttcaacttcgagtacatccactgcatactgaaccacggaaaggcagttcaggtcagtgtgaatgaccaggttagcaacattacggtgaacaaagagttcgcccggttcaagaccggttaaacgttctgcaggaacgcgactgtcggaacatccaatccatagaaagcgcggtttttgcgcttgtgccagtttctcaaaaaacccgggatcctcttccaccagcattttactccatagtgcattgttgctgatgagtgtatctatgtctttcatggaggttaacgacctgtaaccaaataattacgtttggctaatatagggcaactccgggacgatttaaaccacagataaagtgtaagaacgtaaggtaagtaaaaatttatgaccattgcactggaacttcaacagcttaaaaaaacctatccaggcggcgttcaggcgcttcgtgggatagatttgcaggtcgaagcgggtgatttttatgcgcttctcgggccgaacggggccgggaaaagcaccactatcggtattatcagctctctggtaaataaaacctccgggcgggtcagcgtatttggttacgatctcgagaaggatgtcgtgaacgctaaacgtcagttgggactggtgccgcaggaatttaacttcaacccgtttgaaaccgtgcagcaaattgtggtgaatcaggcagggtactacggcgtggagcgcaaagaagcgtacatccgcagcgaaaagtatcttaaacaactcgatctatggggaaaacgcaacgaacgtgcgcgtatgttatctggcgggatgaagcgccgtttaatgattgcccgtgcgttaatgcatgaacctaaactactgattctcgacgaaccgaccgcaggcgtggatattgaacttcgccgcagtatgtggggctttttgaaggatttaaacgacaaaggcaccaccatcattctcaccacacactacctggaagaagcagaaatgctgtgccgcaatatcggcattattcaacacggtgagctggtggaaaataccagcatgaaggcgctgctggcgaagctgaaaagcgaaacctttattctcgatctcgcaccgaaaagcccgttaccgaagctcgatggctatcagtatcgactggtcgataccgcgacgctggaagttgaagtgctgcgtgagcaggggatcaacagcgtatttacgcagttaagtgagcagggcattcaggtattaagtatgcgtaacaaagctaaccgtctggaagagctgtttgttagtctggttaatgaaaaacaaggagatcgcgcatgatgcatctttactgggtggcgctaaaaagcatctgggcgaaagagatccatcgctttatgcgtatctgggtgcagacgctggtgccgccagtcatcaccatgaccctttactttattatcttcggtaacctgattggtagccgtattggcgatatgcatggcttcagctatatgcagttcatcgtaccggggctgatcatgatgagcgtgatcaccaatgcctacgccaacgttgcgagtagtttttttggtgccaagttccagcgtaatattgaagagctgctggtagcgccggttccgactcacgtcattattgccggatatgtcggcggtggcgtggcgcgtggtctgtttgttggcattctggtgacggcaattagtctgttttttgtgccatttcaggtgcatagctgggtattcgttgccttaacgctggtgctcacggcggtgttgttctcccttgcgggtttgctgaacggtgtgtttgccaaaacgttcgatgacatcagcctggtgccaacctttgtgttaacgccactcacgtatttgggcggggtcttttacagtctgactttgttgccgccgttctggcaagggctgagccacctgaacccaatcgtttatatgatcagtggtttccgctacggcttcctcggtatcaatgatgttccgctggtcactacctttggcgtactggtggtctttattgtggcgttttatttgatctgttggagcctgatccaacgtggacgtggtttgcgtagctaaggctatttcctctcctctggatttgggggagaggagttttgacggctatcaccctttatcaacaatggtcagggtagactgattttcggctaaggaggaaggcgatgttaggttgggtaattacctgtcacgatgaccgggcgcaagagatactggatgcgctggagaaaaaacatggggcacttcttcagtgccgggccgtgaatttctggcgcggattaagctctaatatgctcagccgcatgatgtgcgatgctctgcatgaagcggactctggtgagggtgtcatcttcttaaccgatatagccggagcgccaccgtatcgcgtggctagtttattaagccacaaacactcccgttgcgaagtgatttctggtgtcacgttaccgttaattgaacagatgatggcttgccgtgaaaccatgaccagtagtgagtttcgcgagcgtattgtcgaactgggtgcgccggaggtgagtagtctttggcaccaacaacaaaaaaatccgcctttcgtcctcaaacataatttgtatgagtattaacccgcgattctgatggcgcttttgctacaataaaagcgttgtttcaccctcggttattttttcatgtacaaacaagctgttattctcctgctgatgctgtttaccgcaagtgtcagtgccgcgttacctgcccgttatatgcaaaccatcgaaaatgctgcggtctgggcgcaaattggtgacaagatggtgaccgtggggaatattcgggccggacaaatcattgccgtggagcccactgccgcaagttattacgcatttaattttggctttggcaaaggttttatcgataaaggtcatctcgagccggttcaggggcgacaaaaagttgaagacggtttgggcgacctcaacaagccgctgagtaatcagaacttagttacctggaaagatacgccggtctataacgcgccgagtgcgggaagtgcgccatttggggtactggcggacaatttgcgctacccgattttgcataaactgaaagacaggttaaatcaaacctggtatcagatccgtattggcgatcgactggcctatatcagcgcactggatgcccaacccgataatggcctgagcgtgctaacctatcaccatattctgcgcgacgaagaaaacacccgttttcgccatactagcacgaccacaagcgtacgcgctttcaataaccagatggcctggctgcgtgacaggggatacgcgacactgagcatggtgcagctggaaggctacgtgaagaataagatcaatctccctgcgcgagcggtggtgattacctttgatgatggcctcaagagcgtgagccgctatgcgtatcctgtgttgaaacaatatggcatgaaggcgacggcgtttattgttaccagtcgcatcaaacgtcacccgcagaagtggaacccaaaaagcctgcaatttatgagcgtttctgagcttaacgaaattcgcgatgtatttgatttccagagtcatacccattttttgcatcgggtagatggttatcgccgacccatattactgagccgtagtgagcacaatattctgtttgattttgcacgtagtcgccgcgctctggcgcaatttaatccgcatgtctggtatcttagctatccgtttggcggatttaatgacaacgccgtgaaggcagcaaacgatgccggatttcacctggcggtgacaaccatgaaaggcaaagtaaaaccgggggataatccgttgttactaaaacgactttatatcttaagaacggatagcctggagacgatgagccggctggtgagtaaccagccgcagggataacaatcaagcaacctgtaccggaatcgctttcgcggtacgtttcatttcattgtcgccttcaaaataggcgacgttgggtcgccaggtgcgagcttcttcatctggcatggtaacgaagctggcgatgatgacaatatcgccgacactggcgcagtgggccgccgcaccgttaacagaaataattctgctaccgcgttctgccgcgatggcataagtggagaaacgcttgccgttggtgacattccagatatcaatggcttcgttttcgagaataccggctgcgtcaagaaaatcctggtcaatggcgcaagaaccttcatagtgcaggtccgcatgagtcactttcacgcggtggagtttgccctgcagcatcgtgcgaatcataacttctacctttctaccctgtcgttaacgaagcaggcgatgcctgctttgaggaaattctcacgcagtattgcccgatttttgtttagtgtctactcatctgacggcatttgcgtcagcagtttgcgtaccgcgccgaagcgtgccatgtatcgcctgtaacgaattgatatttctctgaacgctgctcggtaaacaataaagaggtggctgacgatagcgcgccttgactggatactgccttcacgcaaagccacacggaagacagggaagatggatgcaccgagtaccacaccgcatgacgcggtatttaaacaatttttaatgcatgcggagacggctcgcgactttctggagatacatttgccagtggaattacgcgaactttgtgacctcaacacgcttcatttagagagcgggagtttcattgaagagagcctgaaaggacacagcacggacgtgctctattccgtgcaaatgcagggcaatcccggttatctgcatgttgtgattgaacaccaaagcaagccggataagaaaatggcctttcgcatgatgcgttattctatagccgccatgcaccggcatctggaggctgaccacgataagctgccgctggtggtgccgatactgttttatcagggcgaggccacaccttatccgctaagtatgtgctggtttgatatgttttacagcccggagctggcgcgacgcgtctataacagtcctttcccgctggtggatatcaccatcacaccggatgacgaaatcatgcaacatcggcggattgcgattctcgaactactgcaaaaacatattcgccagcgcgacttaatgttattgcttgagcaactggtcacgctgatcgacgaagggtacactagcggaagtcagttagttgccatgcaaaactatatgctgcaacgcggtcatactgaacaagcggatttgttttacggtgtgttgagagacagggaaacgggaggggagtctatgatgacgctggcgcagtggtttgaagagaaagggattgagaaggggattcagcagggaagacaggaagtaagtcaggaattcgcccagcgtcttctgagtaaaggaatgtctcgggaagacgttgcagagatggcaaatttacctcttgctgagattgataaggtaattaaccttatttaagttacctgtgttatgacagatgacgtggggtaaattaataactggcgccatcagccgtagcgccagttaagtattacgccagctcgaccattttgttgtcgatcaggcgagcatcgccaagccaggcggctaccagaattactgcccgtttgctggtttcagaaacttccagcaatgtgtcggcatcgcgaatctgaatatcatcggcgcggaagcctttttcattcagttcttgccccgcaatggtaataatttcatcgagatcccgttccccagcctgcaatttgtcagcaatgctacttaaaactttgtacagaccaggcgcaattttgcgttgttccgccgtcagataaccgttacgggaacttagcgccagaccgtctttggcgcgcataattggcacaccgacaatctcaatatcgaagcccatatcggcaaccattttgcggatcagcgccagttgctgaaaatctttttcaccgaagcaggcgatgtccggctggaccaggttgaacagcttgctgacaatagtgctaacgccgcgaaaatgtcccggacggctggcaccttccagcatggtgctaaggccaggaacgtcaacgtaagtgtgggtttcagtaccgttcgggtagatctcttttacgctaggggcgaaaactaaatccactttacgtttgtttagcttctcgcagtcctcctgcaaggtccgtggataacgagccagatcttccgggcggtcgaactgcatcgggttaacgaaaatactgacgacgaccacatcggcgcgggctttggcttcgtcgaccagcttcatatggccatcgtgcaggttacccatggtaggcaccagcgccacgcgcttgccttccatacgcaggcggcgaatttgctgacgcagcagcggcagggtttcgataattaacacaacgtgactccttaatggaaactgtgttcttcgcccggataaacgccggactccacttcagccatatactgccgcacagccgcgcggatgtcgcccgtttcggcgaggaaatttttagcgaatttaggaatgtgaccgccggtaataccaaaggcgtcgtgcatcacgaggatctgcccgtcagtgacgttgcctgcgccaatgccaataaccgggatcgccagtgcttcggtaatacgttttgccagttcaaccggcacgcattccagcaccagcagctgtgccccagcagcttctaaggctaatgcatcgctgagcagttgatcgcccgcttcatcgccgcgcccctgaactttgtagccaccgaaaatattcacactctgtggtgttaaacctaagtgaccacatacaggaacggcacgttcggtcagcatttgtacggtttctaccagccactcaccgccttcaattttgaccatgttagcaccggcacgcataaccgttgcggcgttttcgaaggcttgttccggcgtggcatacgccataaacggcaggtcagccagcagcaggcagtttggtgcgccgcgacgtacggcggcagtgtggtaggcgatatcggcaacggtaactggcagggtggagtcgtgcccctgaaccgtcatgcccaggctatcgcccaccagcatgacgttaagcccttcatcagcaaagagtttggcgaagctatagtcataagcggtgatggtcgcgaaacgttttttttcctgtttgtacttctgcagtaaggagatggtggtcggtttcataacgtatcctgataaattgatgttgtgctgtctggcattttatcagtcacattggtgggggcaatgatttatccgtagcagcactgccagaaggtgacagtgctgctacgttatcagggataggttacctggaaagtactggtggctttaaattcgccgggttcgatagcaatattcccgtcttgctttaatgttgcctggaaatgaagaggctgacttgtgccgttaccttgattagggtaaaccccatcggaggtgtcatcttcggtttcataatctatataaacagaattcgtatcattaggttttaatgtcattagcggatttttactggttgctaaaccttcaatgagtacgccaacgcctttggcggcagtgcttccagtaagcgtattaccaagcagttgtgtgttttgagtacctacttttccagtgacgagttttgtttcaatattacgcacacgaatacaattctgaaggctgatatcaaagggaacaggactagcgccatttttaattgtcccagagctatattctcccattctaaccgtactaccattgacacttggcccggtaagtatggaggtaaaacatgttggtaaggttaatttgacattattcagtgtgaaattgacataaatgtggttgctgtgatctacaacttttgtaccaggactgtaggccttaaagctataaaggtaattactactactggataactggacttgctgattaagtgtaggatcgaaattagtatctgtataaaattcaacagttatgttgtgtactataccaccaatagcccaaaacttatcgtagtcgtctgctttgttgcaacccttagtttgtagatcgctgtctgtgacggaaaagaaaaattcttggttggaaggatctccgatatagattcctgggctttgaatgtcagttattgtatcgtatgcagaccagaccctacttattaacatggtgtaatacagaccaggaacagatgtattaaatagtttatgtccgccataatctttaccactatagaccatggcattttcaatagttattggaccaggattcgctctgccagatgtattgcagtaaagaataccaccaccggtacctgtatccaggtaactccagtacatttttaccccagtcgggccgagctgcgtgggtttataaaaaaccaagttgcttgctgtacttgtgtaattaaaggtcatctgtgcggcagtggaggggcctcgatagttatcaactcctgcattatttcccacaataaaacttgtatatgcactgactgtattacaacaagaatacagtgctaaaaaaagaatgtacctgaagatagtcttcatttttactccaatgtttctttattgttatggtttgcgctgtttttgtttgttattcgtagtaaatatccactaacacatggctcataagttgaccagatgtaacactcaatgcaggatcgattttttgcattcgggtgctaaatttccaggaactaccattcatgtcatcgctcattactggataaacggaacgagatccgccactagcattaagaacattgaatgtattcgcgctatcctgagtagaaaatataactactcctacattacttgctccactgctaatttcattagcaaatatttgcctagagccagcagccatgacaccgctaagggctctaaaatcaatatgtaactgatttagcacatcgccagttccctgtaatgcacagtcggatacagtgatagtgaactcttttccacctggttgataactttcaggagtaacattaccactaaaatatcccaccccaacgacgccaagatcaatattaccctggttactgattccgcttttgcaggtgctgttttttacattggcaacaaggtcaatatcctgtccagcaatggctggacaggcgatgcaaaacagtaaactcagaaacagaattattctcttcatcagcttacgttgagtgggatgcatatatagttcctgaatctgtaagtctgttagttataggttactgtaaatgtggctggtgcagaaaacttacccgcagtgacattgtttacggttttatttttttccacgaccaggcgtgcactcatcggataataaacgaccgcattggctgcagtggagattgttacctcttgacttgctggtgttacacagctaaattgtgttgcactccctgttgccggagttacagtgctccagacttcaacggcgacagcacttgctttatctgcggctgtggaaccatttgcaaaccccgcaccgtcattagcagttccctcgcatgtggctcgcttggttaattttatttgcgcttttttattggggatacccgcacagtctttgaatttgagtttgaatgtttttactttggtcttggcattgatttcagaaatatatacatcaccaaaatcaacaacagaaatgtcctgatcagagtcatttactaatgtagcggtacaagtacccatttctacagtagtaataacggtcagtccaatactgtctgttgccgcataagagagtacgctgaacaaactggcagccaaaacgacactgctggataatccataacgtaaatttttaaatgtcatcataattatccttcttattgatagatgaaattaaacgtcgccagtgcacgaaaattccccggtacgccttgccctgcatctgtttcacgtagcgcaacggtcatttcaagacccttatcgggctgcatctcgtctgtgctccagcgtatcttttccgcactgttaggtttaaggaaagtggcatcatcagtagtccgttttttgaaacccataccgatattacttgtcgtgctagaactatcaccagactgcggtataataagcttaggactgctactacttgcatttccggtcagagtggtatcaatccaactgatgccactgctgcacccactggcaaccagtttaaaatcagcctgagattctgtcgttttattcgcgatcttatccagacccatcttagggattctcaatgtgtagttattattgccatcattcgtgacgttattaccagtaagtgtgatgttacaggttgtcgctttgacagtggctgtaaactctacattaatatccgttgcaaatacactgggacttaataatattcccatcagtatcactattttatgtggcgttgtttttatcatttgacgtcccttgtagttactgaatctgacaccgaattccattcagaataatagattgtgctattttttctgcttctgggctttgttgataatgcgcaagacaacttacgggtttactttgttcgagccatttaatgctgatatttccctgctgctcaataccacgaacaaatgcttgtccaccctgtccaacattaccaatgacattgccttgctcatcataaatatctgcagcaaatggaatatttttaccatcacttcgtgtgatgttcataatggcactttgcccttgcacggtttcaaaatcagcaaagacgacactaccctgacgcggtacagctactgcactggtactttttaattcaacatcgttctcaagatcgttgatatccagcgcgatacggttttcatgataaggagaaagagcgctggtgacaccataaccccatcgatcgatagtactgttgccataatttattcgcgctccttgagcacctggagcctgaactaccgccagtgtatcggagtcgctaaaactatcattactgaaagtcagtccaccgctatgcaatacaaaaccaccgtcggtgctgagagaaacttgacggctgttatcgctatttgcagaaatactacctgccagcgttccccatggactctcatagctggcataacccccaacataactcaaatctttgctggctttattcatcgtatagccagtattcacgctataactgacgcgagcgttatcgctatagccactgctgctaacgttgagttggttattacccttaaagtcactgcttatttgagtatcaatactctggaaaccactagtacgttgttcagtgccaagtaatttttcaattggaatggtgaaactaagataaacgctatcgtcagtgtcgccgtcttcattccaactacgctgggcactgacactgtagctgccccaggatgtactgttactgtagccaatagagtaattgctacgattttgtccggaagcccagtaatcggaccaacttccggaaagataaaaactaccgtaatcttttttctcaaatttcaacggttggttaatactgaccgtaacctgatttttcatgcgactgtaattacgcatggatttcggttcaagatcttgttcgggatgtttcacttcatcaattagagttagtgcatcattaagaccaaggtaattctgtgtgctatagcgataggccgcgatattcagactagtacttgtttcttcgaataacttgttccaggaaacacgataactttgcccctggtatgttttatcatccgggatacgaacattggaatgagtcacatcgaaagaaaatgcaccaacactagtattcagaccaagacctaacaaaccagcggtatagttattatcggttatctgaataccggtataacccgtcagatagttattcaggccgtagtagtagcttgcttgaaataaattaggctcatcctgaatatcatcttttaagacctgaccgccgctaatatcccaacgtccaacgccagggcgtaacatttgaacaacggaactgaaaggttggctgaatgtccgcttactgccatcggattcttcgatggtaacaataagatcgctgccgtacccactcggactcagatcatcaatgacgaaagcgcctggcggcaccgtcgtttcataaatcttatagccaccttgcgtaatagtgactttggcgttggtattggcaacgccatgaatgataggcgcaaagctggctaaagtcggaggcaacatgcggctgtcactgtataaacgaatgcctcggatactgacggaatcaaaggtttcgcccgtcgtataagactcaccaagaatgagttgagaacgcaggctggcgatatcacgctgaacataccgattcttaaaatcataattactgccagaatcggtcatccagttgtagttgccgctggcacgcagtcgccatgcacctaaattcatcccaccgttaaatgcagcataaatgctttcattttttcgaccaggggtttcactatgatatccgttgaggttgtaactcaacatggccgcattaatgccgttttcccataagcttggatcaacatagttttggtaatttttcattacccaggcttgaggaacgtctatatccagacgttgatcgttaacgtcataacgaacagaagcctgagggataatttccgtcaaattgaggcaattgccgagcgtttcatccctggcaagcagaacggctttttcgttatttatatcgggagaattaatatgaaactgcaataaattctttaatgtgatacaagcctgggcgttcttttttccttcaattgcgacaaatgtaatactttggttaatgattggttggtcgtttacataaacactgacgtcgtaaacacccggtatagcggggttaccttcactgtaccggctgagatcaatattagatgcattctgccccatcaggaaggtatggtcatattcaacgagttcagcactgaaagcagtattgcaatacagcagcgcgcaaaacgtggcgatacgggtcagatgatgataatttttagtatattctatagtcacgctatgcttcctgcggaattatatccttgcctgattacagcctggcattaccttcaattgcgccaccaaagtcattaatggcgtaaaaatgcacttttgcagaattcgctttgccattaaggccattgactttcatgacctcatcactaaatggtgcaatcattttcacatcaatcggatagcgtttaccgctagcttctaaatcaccactgctaaaagagacgtagtaaggggttggattggtcactcgtaaactcgccttaccttcactaccactccagaaccacttcagggctaacggggcttcagagggatttcccttcaatccatccgggcgatagaaaagttttatacgtgtgcgaaatgccagttgcagcaggctttgattcgcgaccttttctgcatctggttttggtggaacttccagtacgttaaaccagaacacgctctctctgtctttaggcagactggtgctggctgtgtacattaatttgattgtttgcccacgtttggcatcaatacggcttactggcggcgtagcagtaaaagggactgtaatactgccaggctcagcgttgtcatcgccagtatctaaccaactctggacaagcaacgggttattccctttattttccagacgtacgttgacacttttttgatcgcttttatatattacgcgagtaccgctaatgacaatgtccgcaatagagctactactaaaagccatacaggttacgaagcataaagctgttgtatgtttggtgttaaaaaacataaaccatccctgatagagttaattaaaacagggaataatataaaatagaaattattattccctgtatattcattcaatcaatttaactggtgaatacttactgataagtaatggtgtatgcagtgttagtttttacataaccagcagttgctgtttggtctgcgacggcacgaacgtaagacgctttaaaatcataaacagcagattttgtcgttgcatccagggctttagtatacacatcgccagggttgttaatttgaacctgtttgatagtggaaccatcaatattgtgtagagcgatattaacgccgtcagatgggttgttaatagacatgtcgttgttcaaagtccctttgctgttaccaaagaaaacagaaccgaaggtcattttagccgtgctacctggattcggatttgctttgctgcagtcaacggtgatgctgaaaggtttagctttagcgccaacggtgtcattcagtacgccagcatcgatttcaccaacggttgcggtttgcagcaggatcagaccatccttgttaccgccgtcaacgcgggtttcacaggtgttatcaacaaccagaccactgatatttaactgaccgccgtccatatcagcagaagcagtacctgcaaccatcgccagcataagaccagacagggcaaaacctaattttttagacataaaaatcctttaataaaattccattagtcagactacatgtttgaagaatgactattcatgacacaaataggagaaacaaatgttagatattaatgagcaatgatatttgttacccaaatttacaaccattgttcattaggtcgcctattgtgcactttagaagcttttgaacaaattaaatttacttaattcaaaattaagtaaaaataagttcacaagtgcaattggttagggtatggagatgggattgatatttatttataggaagttatattatttccgcaaagagatgtttaaactaaaatcgtaattaaggaaagagatgagatatgattttcagaaaatatttatattcgcaatataaataaattaccatttgtttaatttgtcaaatgctcttgtatgtaagatttgacgcaacatctccccatcaggaaacaccaactccggcgcgatttcaaacagcggccacagcataaatccacgattcttcatatcgtagtgcggaacggtcaggcgttcagtatttatcacttcattaccaaacagcatgatgtcgagatccagcgtgcgtggtccccagcgttcagctttgcggacgcgaccttgctgcaattcaatacgctgtgtgtgattgagtagctcttcaggtgcaagagaggtttccagcgccacggctgcgtttaagtaatcgggttgatcttgcggccccagcggtggggtgcggtaaaagctagaaacggtaagaatgtggctttcagggatatcgcctaatgctttcagggcagcattgacctgctccagcggagaggccagattgctgcctatggcaatatacgccactgtcatgcggtaccctcacgacgtggtgcgcgtttgcgtggacgacgagtacgacgacgcggactcggttcttcatccagctcgttgagcatccctttttggtctggtggcgcggaaacctggaactcaccccaccatttcaccagacgctgcagttcagcgttacgctcaacttcagctcgcaaggccaacaggtcataagccgcacggaacttaggatgctccagcagtttccatgcgcgtttaccctgacgacgggacatacgcaactgcaactgccagatatcgcgggttaatgtcgtcagacgtttcgggattgccagactacggcaggcttcgtccagcacgtcgttcatcgccagcgcgaaagcgtcgtgataggtcaggccgctttcctgggcgatcttctgtgccgtctccagcagtgggtaccagaacatggcggcaaacaggaacgccgggttcacgcgcatatcgttatggatacgcgtatcggtattcttcagcacctgttcaatgatccgctccatcgggctgtcgccattttccgtgaagtagcgggtaatggtcgggaacagcggctggaacagatgatattcacacaacagcttataggtttcgtaaccgtagcccgcttgtagcagtttaaggctttcttcaaacaggcgtgccggtgggatatcgttcagcagggtagcgaggcgagggatcggttctgcggtttccgggctgatgcgcatacccaatttggcggcaaaacgtaccgcgcgcagcatacgtaccggatcttcacggtagcgcgtttccgggttaccaatcagacggataacgccgtccttcagatccttcatgccgccaacgtaatcacggacggtaaaatccgctacgctgtaatacaggctgttgatagtgaaatcgcggcgctgggcgtcttcttcgatggagccgaaaatgttgtcgcgcagcaacatgccgttttgcccgcgttgggaggtcgtgcggtcgctgacgttaccttcgtggtgtccacggaaggtcgcaacttcgataatctccgggccaaacattacatgagccagacggaaacggcgacccaccaggcggcagttacggaacagtttgcgcacctgctcaggcgtggcgttagtggttacgtcaaaatctttcggctttttgccaagtaacaggtcgcgcacgccgccgccaaccagccaggcttcgtatcccgctttattgagcctgtacattaccttcagggcattttcactgatatctttgcgggaaatagcatactgctcacgcgggatcaccgtcacctgtggacgggcgactgcctgttcagcctcgctttcctcgcggcttagcaccttgcggcaaaaattagcgactcgggtaaaaatagtacacctcggtagtgtcaaacatcattcaggacaaaaaaatagcggctaatcatagctcagcaactcgcattactgaatgtactatttacaattgcgctctcgggcacggcggtaagccgccagtttttgacggcactctgaaggatttgctcgacgctgaaatcctgccagtgtgcttctgcctgctgccccagaaattgaagtgccgcgattagtaccgggcgtggatcgcctttcggcaacgcaggcgcatgattctgcttggaaagtttagcgccttgtggattaagcgccagcggcagatgaatgtaatctggcactttccagccaaaaagctggtacaggctgatttgccttactgttggttcaatcagatcagccccacgcactatttctgtaacgccctggaaatgatcatcaaccacaacagccaggttgtaggcgaacaacccatcacggcgatgaatgataaaatcttcccgtgccagtttttcgtcggcgtgaataatgccgcgcagctggtcagtaaattgcgtgaccggatgctgctggcggatacgcactgcggcgttgtctggtccatgatgcaacacccggcaatgaccgtcgtaaataccgccaatgctttgaatacgcgcacgcgtacaggtgcagtaataacttagtccttgttcatgtaaccaggcgagtgcttcacgataggcgtcgtgacgttggctttgccagagaacatcgccgtcccagtgcagaccgtaatgttccagctggcgcaggatagtttctgcggcaccgggaacttcacgaggcgggtcgatatcttctatgcgtaccagccagcgaccttgccgggcgcgagcctgcaaatagctgccgagcgcggcgatcagagagccaaaatgaagctcgccggaaggagagggggcgaagcggccaatatactgtgtgtctgtcatctctttgaacaaaaaataaggcgggagcatttcccgcctgtggtaaacgtgatggaacggctgtaattagccagccatctgtttttcgcgaatttcagccagcgttttgcagtcgatgcacagatcggctgtcgggcgcgcttccagacggcgaataccaatttcaacaccgcaggattcgcagtagccgaaatcttcgtcttccacttttttcagcgtcttctcgatctttttgatcagcttacgctcgcgatcgcggttacgcagttcgaggctgaactcttcttcctgggctgcacggtctaccgggtccgggaagttggctgcttcatcctgcatatgtgtaacggtgcgatcgacttcatccctgagttgattacgccatgcttccagaatacgacggaagtgcgccagctgggcttcattcatatactcttcgcccggcttctcctgatatggttccaccccagcgatggcgagaatactcagggagcttgttttacggttttgcccttcttgcatgttgcttctccttaacacgcactatcgatccccatgttcgggggaaaaatgaggccgctataaatagcagatgcttttccggatagcaattatctaaacgtaacacttgacaactgtgtgaggaaaagcgtatttgcgcacgcgaccagaatgtaaattaaccagttacttactttattacaatgtaaccggcagactttttttaagagccatgccttcagcagaaatttccgctttgtaagccagaatttctacccccctctgttgagcttcactcaatagttgcgcgtatttctcatcgatgtggcgcgcgggactaaaccgtgtaatggcactatgcagcacggcgaaaaagataaccgcacgctggccttcagccgctacgctcatcaactcccgaaggtgtttctgacctcgttcagtgaccgcatcgggaaaatatccctgttcgttctccgctaacgtaacgcttttcacttcaatatagcagtctggacggctatccgcctgcaacataaagtcaatacggctgcgttctgcgccgtattttacttcgcttttcaggctgctatagccactcagttcactaatactttcattaaggatagcctctttcgtcaacctgttagcccaaagcgtgttgacgcaaataaatgcgccgctctggctttgagttaattcccaggtgtgtgggtatttccgtttggtgttgtcactagtgctataccagacggtatcgccaggcgttgcacaaccggtcatcgcacccgtattcgggcagtgtagcgttaattcgcgaccatcgggtgtgatcacatcggctaaaaaacgtttgtaacgctgaattagcgtcgcgcgctgtagagggggagaaaattccattgcgacaatccttgttattgcgttagcgcccagcgttttagcggcgtgtagcgtgtgcgtccacgggcaaagctggaggcgtaaagggtgaactccgtcaccgcatagctccagttaaaacctggcggcgggattgtcaccgcctcgctggcgtcgcgcaataaggtaatatgtggatgaaacggacgattgctttgaaaacaaccgctgcgggcagcctgactacggagcatattcgccagctggattaagccgcgtggcggctgacgcatccctaaccacaccacacggctacgcagccattgtccggcgtcatcaagcgtgagtgtgaaaccaggttgacgaatccgtccggctaaaagagaaagcgccttctctttctcggcgctcacttcgcctaaaaatgccagagtcagatgcaaattatcggcggcgaccggacgtcccgcctcaggtgggaagtgtgtggcgcgccaatggataatctgttcgcggatttctgcaggtaagtcgatagcaaagaacagacgttgcggttcagacatgtgaggcactcggttatgaattaccgcgatgctacaatgtggcgcgaagaatgttaaccctctggagcgttttgtgagcagcttgcccgttgctgccgtcttacctgaattacttaccgctctcgattgtgcgccgcaggtattattaagtgcgccgaccggggccgggaaaagtacctggctgccgctgcaactgctggcgcatcccggcattaacgggaaaattatcctgctggagccgcgtcgtctggcggcgcgtaacgtcgcgcaacggctggcggagctgcttaacgaaaagccaggcgataccgttggctaccggatgcgtgcgcaaaactgcgtcgggccgaatacccgcctggaagtggttaccgaaggcgtgctgacgcgcatgatccagcgtgacccggaactgagcggtgttggactggtgatccttgatgaatttcatgagcgcagcttgcaggcggatttggcgttggcgctgttactcgatgtgcaacaaggtctgcgtgatgaccttaaactgctgattatgagcgctaccctggacaacgaccgcttgcagcaaatgctgccagaagcgcctgtcgtcatcagtgaagggcgcagctttccggttgaacgccgttatttaccgctgcccgcgcatcagcgttttgacgatgccgttgcggtagccaccgctgaaatgctgcgtcaggaaagcggaagtttactgttatttttacctggcgtcggagaaattcagcgtgtgcaggaacaactggctagccgcatcggcagtgatgtattgctctgcccgctgtatggcgcgttgagcctgaacgatcagcgaaaagcgatcctcccggcaccgcaagggatgcgcaaagtggtgctggcgaccaatattgctgaaaccagtttaaccattgaaggtattcgtctggtggtggattgtgcccaggagcgtgtggcgcgttttgatccgcgcacggggcttacgcgactgattactcaacgcgttagccaggcatccatgacgcagcgtgccgggcgcgccgggcgtctggagccgggtatcagcctgcatttaatcgccaaagaacaagcagaacgcgccgcggcgcaaagtgaaccggagatcttacaaagcgatctttccggtttgctgatggaattactgcaatggggatgcagcgatccggcgcagatgagctggctggatcaaccgccagtagtgaatctactggccgcgaaacgtctgttacaaatgctgggggcactggagggtgaacggcttagtgcgcaagggcaaaaaatggcagcgctgggtaacgatccgcgtttagcggcaatgctggttagcgcgaagaacgacgacgaagctgctaccgcggcaaaaattgccgccattctcgaagagccgccacggatgggcaatagtgacctgggcgtggcgtttagccgcaatcaaccagcctggcagcaacgtagtcagcaactgttaaaacgcttaaacgtacgtggcggtgaggcagacagtagccttatcgcgccgctacttgccggggcgtttgccgatcgcattgctcgtcgccgtgggcaagatggacgctatcaactggcaaacggcatgggagcgatgctcgatgccaacgacgcgctaagccgccacgaatggttgatcgcaccgttattattgcagggcagcgccagcccggatgcgcggattttactggcgctgctggtcgatattgatgagttagtacaacgctgcccgcagctggtacagcagtctgacactgtggagtgggatgacgcgcaaggtacgctgaaagcctggcgtcggctacaaatcggtcagttgacggtgaaagtgcagccgctggcgaaaccgagtgaagacgagttgcatcaggcgatgcttaatggcatccgtgataaaggtttaagcgtgctcaactggacggcggaagcggaacagctacgcttgcgtttgttatgcgccgcaaagtggttgccggaatatgactggccagcggttgatgatgaaagtttattggcagcgctggaaacgtggctgctgccacatatgactggcgtacatagtctacgcggcctgaaaagtctcgacatttatcaggcactacgcggattacttgattggggaatgcagcaacgtctggatagtgaattgcctgcgcattacactgtgccgacgggaagccggatcgccattcgttatcatgaagataacccgcccgcgctggcggtgagaatgcaagagatgtttggcgaggccaccaatccgacgatcgcccaggggcgcgtgccgctggtgctggagttgcttagtcctgcccaaaggccattacaaatcacacgagatttgagcgacttctggaaaggagcgtaccgtgaggtgcaaaaagagatgaaagggcgttatcccaaacatgtctggccggacgacccggcaaatactgcaccgacgcgacggacgaaaaagtatagctaaggttggttttctccctctccctgtgggagagggccggggtgagggcatcagcgcgcacgttcaccctcaccctaaccctctccctcaagggagaggggaccgatcgagcacaaattttgagagatatcttcttctgtcttgtaacagaagaacagaaaatcgggcttttgcgcctgaatattgcggagaaaaagcatggccgggaatgaccgcgagccaattggacgcaaagggaaaccgacgcgtccggtcaaacaaaaggtaagccgtcgtcgttacgaagatgacgatgattacgacgattatgatgactatgaggatgaagaaccgatgccgcgcaaaggtaagggcaaaggcaaagggcgtaagcctcgtggcaaacgcggctggctatggctactgctaaaactggctatcgtttttgccgtgctgatcgccatttacggcgtttatctcgatcaaaaaattcgtagccgtattgatggcaaggtctggcaactgcctgcggcagtttatggccgaatggtcaatcttgagccagacatgaccatcagcaagaacgagatggtgaagctgctggaggcgacccagtatcgtcaggtgagcaaaatgacccgtcctggcgaatttaccgtgcaggccaacagcattgagatgattcgccgtccgtttgatttcccggacagtaaagaaggacaggtgcgcgcgcgtctgacctttgatggcgatcatctggcgacgatcgtcaatatggagaacaaccgtcagttcggtttcttccgtcttgatccgcgtctgatcaccatgatctctagcccaaacggtgagcagcgtctgtttgtgccgcgcagtggtttcccggatttgctggtggatactttgctggcgacagaagaccgtcatttttacgagcatgatggaatcagtctctacagtatcggacgtgcggtgctggcaaacctgaccgccggacgcacggtacagggtgcgagtacgctgacgcaacagctggtgaaaaacctgttcctctccagcgagcgttcttactggcgtaaagcgaacgaagcttacatggcgctgatcatggacgcgcgttacagcaaagaccgtattcttgagctgtatatgaacgaggtgtatctcggtcagagcggcgacaacgaaatccgcggcttcccgctggcaagcttgtattactttggtcgcccggtagaagagctaagcctcgaccagcaggcgctgttagtcggtatggtgaaaggggcgtccatctacaacccgtggcgtaacccaaaactggcgctggagcgacgtaatctggtgctgcgtctgctgcaacagcaacagattattgatcaagaactctatgacatgttgagtgcccgtccgctgggggttcagccgcgcggtggggtgatctctcctcagccagcctttatgcaactggtgcgtcaggagctgcaggcaaaactgggcgataaggtaaaagatctctccggcgtgaagatcttcactacctttgacagcgtggcccaggacgcggcagaaaaagccgccgtggaaggcattccggcactgaagaaacagcgtaagttgagcgatcttgaaactgcgattgtggtcgtcgaccgctttagtggtgaagttcgtgcgatggtcggaggttctgagccgcagtttgcgggctacaaccgtgcgatgcaggcgcgtcgtagcattggttcccttgcaaaaccagcgacttatctgacggccttaagccagccgaaaatctatcgtctgaatacgtggattgcggatgcgccaattgcgctgcgtcagccgaatggccaggtctggagtccgcagaatgatgaccgtcgttatagcgaaagcggcagagtgatgctggtggatgcgttgacccgtagcatgaacgtgccgacggtaaatctggggatggcgctggggctgcctgcggttacggagacctggattaaactgggcgtaccgaaagatcagttgcatccggttccggcaatgctgctgggggcgttgaacttaacgccaatcgaagtggcgcaggcattccagaccatcgccagcggtggtaaccgtgcaccgctttctgcgctgcgtagcgtaatcgcggaagatggcaaagtgctgtatcagagcttcccgcaggcggaacgcgctgttccggcgcaggcggcgtatctgacactatggaccatgcagcaggtggtacaacgcggtacgggtcgtcagcttggggcgaaatacccgaacctgcatctggcagggaaaacagggactaccaacaataacgtagatacctggtttgcgggcattgacggcagcacggtgaccatcacctgggtcggccgtgataacaaccagccgaccaaactgtatggtgccagcggggcaatgagcatttatcagcgttatctggctaaccagacgccaacgccgctgaatcttgttccgccagaagatattgcagatatgggcgtggactacgacggcaactttgtttgcagcggtggcatgcgtatcttgccggtctggaccagcgatccgcaaagcctgtgccagcagagcgagatgcagcagcagccgagtggcaatccgtttgatcagtcttctcagccgcagcaacagccgcaacagcaacctgctcagcaagagcagaaagacagcgacggtgtagccggttggatcaaggatatgtttggtagtaattaacatctaagcgtgaaataccggatggcgagttgccatccggtaaaataacatcccatctaagatattaaccctttcttttcatctggttgtttattaacccttcaggaacgctcagattgcgtaccgcttgcctgtaagactcaatgtaagccgtgccaaaatatgatggctaggacgagctagaacccgccagcgtttcgaatattatcttatctttataataatcattctcgtttacgttatcattcactttacatcagagatataccattccatataacggccctgtacgcctggacggataaagcgtttacgcgacaacggatgcccgatgcgacgctggcgcgtcttatcgggcctacaaacggccccgaatcgtaggtcggataaggcgttcacgccgcatccgacaaaccatgctggatcacaacttcgcaaacacccgacgtgcagcatcgatggtgttattgatatcttccatgctgtgcgccacggacataaagcccgcttcaaacgcactcggtgccaggtaaacaccttcgtccagcatcatatggaagaaacgcttaaagcgttccacgtcacaggccatcacatcctgatagcacgtcacggactcggcgtcggtaaagaaaataccgaacatgccgccaacgtggttaacgaccagcggaattccggcttcttctgccgcttccagcagaccttctgccagacgtgttgtcagctcatccagcgtttcgtgaacgcccggctgcgcgacttcattcagacaggcgaaacccgctgccatcgcaatcgggttaccggaaagcgtacccgcctgatagaccggacccgtcggggccagcgcatccattacatcacgacgaccaccgaatgcgcctaccggcattccaccgccgatgattttgccgaggcaggttaaatctggcactacgccgtaataatcctgtgcgccagctagcgctacgcggaaaccggtcatcacttcatcgatgatcagcaacgcgccaaattcgtcgcacagcgcgcgcagacctggcaggaactctggcagcggcggaacacagttcatattgcctgccaccggctcgacgataatacaggcaatctcttgcgggtattgctcaaatgcggcgcgtacagaagccagatcattataagtacaggttaaggtatatttggcgaaatctgccggaacgcccgggctgtttggctggcctaacgtgagtgcgccagaaccggctttcaccagcaggcagtcagcgtgaccatggtaacacccttcaaatttaataattttgtcgcgaccggtaaaaccacgggccaggcggatggcgctcatggtcgcttcagtgccggagttcaccatgcgcaccatatccatggtcgggaccagttcggtcaccagttgcgccattttcacttccatttcggttggtgcaccaaagcttaaaccacgctcggcggcttcaatcacggcattgcggattgccggatggttatggcccagcaccatcggcccccaggaaccgacataatcgatataggctttgccatcaacatcgtacagataagcgccgtccgctttttcgataaacagtggagtgccgcccacgccagtaaaggcgcgaacaggggagttcacaccgccagggatcagctcgcgcgctgcgctgtaaagattttcagacttactcatggagggttcctgattcgtagaaaaagtgaatggctgctattctatgttattcataacaagttaaatactcgtcaaacatcaggctgcttgtactggtgcaatcctgatttcttagagtataaaagttttgtgcatttgaaacattacgctttgcaaaggattttcatggaacgtgcgagtaaaatgccgtcatcttatttgtatgaccaataagtgatcattggatgaaaactgatactccctctttagaaacaccgcaggccgcgcgcctgcgacgcagacaactgattcgccaacttcttgagcgcgataaaaccccgttagccattttgtttatggcggcagtcgtcggcacgcttgttgggctggcagcggttgcttttgacaaaggtgtcgcctggttgcagaaccaacgtatgggggcgctggtacatactgctgataattatccgcttctgttaaccgtcgcttttctctgtagcgcggtgctggcgatgtttggctactttttggtgcgcaaatacgcgccggaagcaggtggtagcgggatcccggaaattgaaggggcgctggaagatcaacgtcccgttcgctggtggcgtgtattgccggtgaagttctttggcgggctggggacactcggcggaggcatggtgttggggcgcgaagggccaaccgtgcagatcggcggtaacattggccgtatggtgcttgatattttccgcctgaaaggtgacgaagctcgccatacgctgctggcaaccggtgctgctgcggggctggctgcggcctttaacgcgccgctggcgggtattttgtttattatcgaagagatgcgtccgcagtttcgctatacgttaattagcattaaagcggtatttattggtgtcattatgagcaccattatgtaccggatttttaatcatgaagttgcgttgattgacgtcggtaaactttctgatgcgccgcttaatacgctgtggctttatctgatcctcggtattatttttggcattttcggccctatttttaataaatgggtgctggggatgcaggatttgctgcaccgtgtgcacggcggcaatattaccaaatgggtgctaatgggcggtgcgattggcggtctgtgtggattgctggggtttgtggcaccagcaacgagcggcggcggttttaacctgattcctatcgctaccgcggggaatttcagcatgggaatgctggtgtttatcttcgtcgcgcgggtcattaccaccttactctgcttctcttccggcgcgccgggcggtatttttgccccgatgctggcgctgggtactgtgctgggaaccgctttcggaatggttgccgttgagctgtttccgcaatatcaccttgaggcggggacgtttgctattgccggaatgggggcattactggcggcatctattcgcgcgccgttaacggggatcattctggttctggagatgaccgataactaccagctcattttgccaatgattattaccggtcttggcgcaacactattagcgcaatttaccggcgggaaaccgctatacagcgcgattcttgcgcgcacgctggcaaaacaggaagctgagcaactggcgcgaagcaaggccgcaagtgccagcgagaatacttgaacgaaataccagggtattagataatggcgattattattgggttagaatttgcccaattgccgatgtcgtttggagcaaaatatgagtgatgacgtagcactgccgctggagtttaccgacgcagcagccaacaaagttaaaagcctgatcgctgacgaagataacccgaatctgaaattacgcgtgtatatcaccggtggcggttgcagcggcttccagtatggtttcacctttgatgatcaggtgaacgaaggcgatatgaccatcgaaaaacagggcgttggcctggtggttgatccgatgagcctgcaatatctggtcggcggttccgttgattataccgaaggtctggaaggttctcgtttcatcgtgaccaacccgaacgcgaaaagcacctgcggttgcggttcttcctttagtatctaatctgttgttcatgtgccggataaactatccggcacatcttctctcttcaacgcccattctcatccagcgcaaacgtcggtagcttaagatgccaacgaatagccgccagccgaatcaatagcgtcacgaccatgcccatcatactggctgtttccagtggtacggaaaatgtgtaataagccgtagcgtggacaataccgccgataatacaggcagttgcgtagatttctgtacgtaaaatcatggggatttcgcgggccagaacatcacgaatgatcccgccgccaacgccagtaatgacgcccatacaaaccgcgattaacggaccggcttccgcattaaaggctttattcacgccaatgccgacaaacaccgccagaccaacggcgtccagcaccggcaacatccattttggtaagcgtcttggctggcgcaccagcacgatggtcagcatgctggtgaccattgcaacgaccagatcggtgggatctttcacccaaaataccgggccgtgatccagcgccatgtcgcgaattgtcccgccgcctactgcggttaccacgcccagtaccagaacaccaaaagggtccatacgcaattttccggctaacaaaacgccggagatggcaaataccgctgtgccgactatattcagccaatagacgagcattgttcaatccccactgagcacctgaaaaggtcaggcgttaatctacctgactaagcgcattacagagctgttgtgcagcgaggataatacgtgggcttgcacgttcaaaccagtcactcgtgagaggaataacgggaattttgagctgttcaccccagtattgtttgattttaggaatttggtccggtccgcctgtaatgacaatcgcctgtgggctgcgtgctaacacctgttcgcggctaacttgcggccagggaacccggctgtctttaaagatgttttctccgccacaaacttcgagtacctggttctgaatgctctcttttccactggtaaatggcggattaatgccgaattgcagaaaaacacgttttttaggtttatcagcatattgcgctttcaattgcgcgtactgatccagcagggattgcgcggcttgttcggccttgtctggttgcggactccagggggccagttgacgtaacgcattggcaatttgttcaatgcttgtcgcatcgacccacatcacttttattcccaggctagccagctggtcaacctgccgctcggcattacctccacgccaggcaatcaccagatcgggtttcagcgcgacaatgcgttccagattcatcccctgccaggtggaaacctgctcaatcttttgcgcttgtggaggatagtcggaatagctgctgaccccaaccggcgtgatcccggcggcaaaggcaagttcagtgttggcgggagaaagcgtgatgacgcgcggcgcggcgttgagccacagtggcgcaagaaaagacagggcgaccagcgccctgaacagactcttagccatgtgcaagtttctgcaccagactctcaaccatcaggctggactgtttagcggcaacagccaggaactcatcgaagctaagataagactgttgatcggccacgtcggagatggcgcgtacgacaacaaacgggacgttgaaattgtggcagacatgggcgattgccgtcgcttccatctctacagcaatggcctgtgggaagttgtggcggattttcgccagaccaacagaaccgttgatgaaagcgtcgccgctaacaatcaggccacgtacagcgttaagattcagttcggcaatgcaggcctcagcggcagcgatcagtttatcgtcagctttaaagcctgccggacagcctggtaactgaccgtattcataaccaaatgccgtgacatccgcgtcgtgataacgtgcttcgtcgctgacaacgatatcgcccactttcaacgttggtgccaggccaccggcagaaccggtgttaataatcacatctggcttgcagtgttccaacagcaaagtggcacccagcgccgcagcgactttaccgatgccgcttttcagaagcgcaacctcggttccattcagttggccggtatagatttcgcaaccgccgagactgatagtttgacggttttcgattttgtcacgcagcagcgtaacttcttcttccattgcaccaatgatgccgattttcatagatttactcgcgataagcccgatttgaaggcatagtttaccatgcgcttacggggaagcgtatttctcacgcgggagaggacatggcacagattgatttccgaaaaaaaataaactggcatcgtcgttaccgtagtccgcagggcgttaaaaccgaacatgagatcctgcggatcttcgagagcgatcgcgggcgtatcatcaactctccggcaattcgtcgtctgcaacaaaagacccaggtttttccactggagcgcaatgccgccgtgcgcacgcgtcttacccacagcatggaagtccagcaggtggggcgctacatcgccaaagaaattttaagccgtctgaaagagcttaaattactggaagcatacggcctggatgaactgaccggtccctttgaaagcattgttgagatgagttgcctgatgcacgatatcggcaatccgccgtttggtcattttggcgaagcggcgataaatgactggtttcgccaacgtttgcacccggaagatgccgaaagccagcctctgactgacgatcgctgcagcgtggcggcactacgtttacgggacggggaagaaccgcttaacgagctgcggcgcaagattcgtcaggacttatgtcattttgaggggaatgcacaaggcattcgcctggtgcatacattgatgcggatgaatctcacctgggcacaggttggcggtattttaaaatatacccgtccggcgtggtggcgtggcgaaacgcctgagacacatcactatttaatgaaaaagccgggttattatctttctgaagaagcctatattgcccggttgcgtaaagaacttaatttggcgctttacagtcgttttccattaacgtggattatggaagctgccgacgacatctcctattgtgtggcagaccttgaagatgcggtagagaaaagaatatttaccgttgagcagctttatcatcatttgcacgaagcgtggggccagcatgagaaaggtagcctctttagcctggtggttgaaaatgcctgggaaaaaagtcgcagtaatagtttaagccgcagtacggaagatcagttttttatgtatttacgggtaaacaccctaaataaactggtaccctacgcggcacaacgatttattgataatctgcctgcgattttcgccggaacgtttaatcatgcattattggaagatgccagcgaatgcagcgatcttcttaagctatataaaaatgtcgctgtaaaacatgtgtttagccatccagatgtcgagcggcttgaattgcagggctatcgggtcattagcggattattagagatttatcgtcctttattaagcctgagcttaagtgactttactgaactggtagaaaaagaacgggtgaaacgtttccctattgaaagccgcttattccacaaactcagcacgcgccatcggctggcctatgtcgaggctgtcagtaaattaccgagtgattctcctgagtttccgctatgggaatattattaccgttgccgcctgctgcaggattatatcagcggtatgaccgacctctatgcgtgggatgaataccgacgtctgatggccgtagaacaataaccaggcttttgtaaagacgaacaataaatttttaccttttgcagaaactttagttcggaacttcaggctataaaacgaatctgaagaacacagcaattttgcgttatctgttaatcgagactgaaatacatgaaaaaaaccacattagcactgagtgcactggctctgagtttaggtttggcgttatctccgctctctgcaacggcggctgagacttctagtgcaacgacagcccagcagatgccaagccttgcaccgatgctcgaaaaggtgatgcctagtgtggtcagcattaacgtagaaggtagcacaaccgttaatacgccgcgtatgccgcgtaatttccagcagttcttcggtgatgattctccgttctgccaggaaggttctccgttccagagctctccgttctgccagggtggccagggcggtaatggtggcggccagcaacagaaattcatggcgctgggttccggcgtcatcattgatgccgataaaggctatgtcgtcaccaacaaccacgttgttgataacgcgacggtcattaaagttcaactgagcgatggccgtaagttcgacgcgaagatggttggcaaagatccgcgctctgatatcgcgctgatccaaatccagaacccgaaaaacctgaccgcaattaagatggcggattctgatgcactgcgcgtgggtgattacaccgtagcgattggtaacccgtttggtctgggcgagacggtaacttccgggattgtctctgcgctggggcgtagcggcctgaatgccgaaaactacgaaaacttcatccagaccgatgcagcgatcaaccgtggtaactccggtggtgcgctggttaacctgaacggcgaactgatcggtatcaacaccgcgatcctcgcaccggacggcggcaacatcggtatcggttttgctatcccgagtaacatggtgaaaaacctgaccagccagatggtggaatacggccaggtgaaacgcggtgagctgggtattatggggactgagctgaactccgaactggcgaaagcgatgaaagttgacgcccagcgcggtgctttcgtaagccaggttctgcctaattcctccgctgcaaaagcgggcattaaagcgggtgatgtgatcaccagtctgaacggtaagccgatcagcagctttgccgcactgcgtgctcaggtgggtactatgccggtaggcagcaaactgaccctgggcttactgcgcgacggtaagcaggttaacgtgaacctggaactgcagcagagcagccagaatcaggttgattccagctccatcttcaacggcattgaaggcgctgagatgagcaacaaaggcaaagatcagggcgtggtagtgaacaacgtgaaaacgggcactccggctgcgcagatcggcctgaagaaaggtgatgtgattattggcgcgaaccagcaggcagtgaaaaacatcgctgaactgcgtaaagttctcgacagcaaaccgtctgtgctggcactcaacattcagcgcggcgacagcaccatctacctgttaatgcagtaatctccctcaaccccttcctgaaaacgggaaggggttctccttacaatctgtgaacttcaccacaactccatacatcttcatcatcctttaggcatttgcacaatgccgtacgttacgtacttccttatgctaagccgtgcataacggaggacttatggctggctggcatcttgataccaaaatggcgcaggatatcgtggcacgtaccatgcgcatcatcgataccaatatcaacgtaatggatgcccgtgggcgaattatcggcagcggcgatcgtgagcgtattggtgaattgcacgaaggtgcattgctggtacttagtcagggacgagtcgtcgatatcgatgacgcggtagcacgtcatctgcacggtgtgcggcaggggattaatctaccgttacggctggaaggtgaaattgtcggcgtaattggcctgacaggtgaaccagagaatctgcgtaaatatggcgaactggtctgcatgacggctgaaatgatgctggaacagagccggttgatgcacttgttggcgcaggatagccgtttgcgggaagaactggtgatgaacctgattcaggcagaggagaatactcccgcacttactgaatgggcgcaacggctggggatcgatctcaatcaaccgcgagtggtggctattgttgaggtcgacagcggtcagcttggcgtggacagcgcaatggcggagttacaacaactgcaaaacgcgctgactacgcccgagcgtaataatctggtggcgattgtcagcctaaccgaaatggtggtgttgaaaccggcgttgaactcttttgggcgctgggatgcagaagatcatcgtaagcgagttgaacaactgattacccgcatgaaagagtacggccagctgcgttttcgcgttagtctgggcaactattttaccggtcctggcagtattgcccgatcctatcgtacggcgaaaacgacgatggtggtgggtaaacagcggatgccagaaagtcgctgctatttttatcaggatctgatgttacctgtgttactcgacagtttgcgtggcgactggcaggccaacgaactggcgcgaccgctggcgcggctgaaaacgatggacaataacggcttgctgcgacgaacgctggcggcgtggtttcgccacaatgtgcaaccgctggcaacgagtaaggcgttgtttattcatcgtaataccctggagtatcggcttaatcgtataagcgaactgaccgggcttgatttgggcaattttgatgacaggttgctgctgtatgtggcgttacaactggatgaagagcggtaagttatgcgttaaggttgaggcggcgctggctcattcccctcagcccgaagggtagaggggaatgcccgaattaaccgtcagttcgggattatttacgcgttagtttttccagatcggcttcaatctcgctgatcttattggttacgacactctccaggtgacgtaagtcgtcgaggatcttacgcttaagatcaacttcgctgcggtcacgctggcagatttgatcaagctcatcaatgatataccgtagattcgggctgatttcctggacttctttataaccctgacccacaccatcagcgacgaccgttttacgctgacgcggatatttaaacttaacgctcttggcgaaaaactcgcctttgtctttctggaaatagattttcagaatatcgttgttggcttcctgccggaggctgtaacgatcaatttcttcaggattggtaatacccagacttttcagattgtcgtacatagcgttacctcaaaatgagtcagtaaattgtgcttattttagcatttggcctggcccgcccggctcgactgtgatcgcagaaagcctttttcttccagacttctatcatggcgtaaaaatcaaaaaattacctgctttattctggtgataaaattcacgatttacaccagttccagcatcgttacttccgggcggcagttcagacgcaaaccatacaaactgcccacgccacgggttgtgtagatgtgtctttcgccaaaggcatttaatccggcgacgtaacgtttatcttcgacaggggcaaaaggttcaccaaccaacggtacgcgcagttgcccgccgtgagtatggccgcacagcatcagatcccagggttcatcacgcatgacttctttgctgtcgggattatgcgccagcaccagtcttggcagattggcttcgctggcgggaggcggtttgcattgtccggcccataagtcaccagtgcctaccagttcgaattgcctgttcggcgtggcgatcaccgtagcctggttaaacaacaccgtgatgcccgcacttttcaacgtctcgccaattaagtgatttttttctgtaccaacagggcgatcgtggttgccgaagcaggcaaacgtcggcgcacattcggcaaggggggagagtacgtcactaaacgcgctaaaattcaggctcatatcaaataatacgtaatcgccgcccagtaatatcaaatcgggcttttgttctatgccaagagcaatcgcgtcagaaatcaggcttaaaggaacaaaacgagagtaatggagatcggccagaaaaagaattttgaatggtgctgcgttgtctttaaaaaaggcgaggcggtgacggattaattcaaaccagcctggctcacagtaatgcatataaccgaaaccactgctcgtggctatcgtcgcggcagtagcctgcaaaaatcggcggcgactaatcatcgctcatccctgcaaaaaaatcgggcagcgtcgtgctgcccgtgtgcatacttttagtcgatggtacgcagcagttcgttaatgccgactttgccgcgagttttcgcgtcaactttcttaacgataaccgcacagtagaggctgtatttgccatctttactcggcagattaccactaacaaccacagaccccgccggaacgcgaccgtagtggatttcgccggtttcacggtcgtaaatacgggtgctctgaccaatgtatacgcccatggaaatgacggaaccttcttcgacaatcaccccttcaaccacttcagagcgcgcgccgatgaagcaattatcttcaatgatggttgggttagcctgcagcggttccagcacgccgccgatgcccacgccaccggaaaggtggacgtttttaccaatctgcgcacaagaaccgacggtcgcccaggtatcaaccatggtgccttcatcaacatatgcgccgatgttgacgtaagacggcatcagcacggtgttacgggcaataaacgcaccctgacgtaccgccgctggtggcacaacgcggaagccttctttctggaaacgtgcttcgtcgtagtcggcgaatttcatcggcactttgtcgaagtagcggctttctgccccttcgatcacctgattatcattaatacggaaagagagcagcaccgcttttttcaaccactgatgcgtcacccactgaccgtcaattttttccgctacacgcagtgcgccggaatccagcagggcgatcacctgatttaccgcttcgcgggtaacggtgtctgcattggctggcgtgatctcggcacggcgttcaaaagcggtttcaataatgttctgtaactgctgcattgttaaactcttttcatatcagtaaacacatcaccctttatcgtttggattgagggcctctgtcaaccgctgatgcacttcctgctgcaactcgttattaagcgcacgccggtcagcggtggcaattatgaataaatcttctactcgctcgccaatggttgtaattcgggcaccatgaaggctaattcccagatcggcaaaaattttcccgactcgcgccagcagtccaggttggtcgagggcgatcagttcgaggaagcttttgcggtcggtatgggtcggcaaaaacgttacttcggtttcaacagtaaaatggcgtaatttggcgggttggcgacggggctgcggtggctgccagctactttgcgtcagtacttgctccagaccaaaccgaataacctcatgacgatctgcggacagcgggttgccatcgggttccagcacgataaaggtatccatcgccataccgtcgcgagtggtgaaaatttgtgcgtcgtgaacacttaaattgcggcggtctaattcggcacagacggcggcaaacagataagggcggtccgggctccagataaaaatctcggtgcctccacgcgtagcctgcgggctaagcaataccagcggtttgcttaaatcatgctgtaataaatggcgggcatgccaggccagttgatttgggctatggcggacaaaatagttagcacgacagcgactccaaatttggtgcagcgcctcttcgtcgatgttatccatgcgcagtagtgccagtgcctggagttggtgatggcgaacccgttcgcgcatatccggcgtgttttgcattccgcgtcgtagctgcttttcggtggcaaagtagagctcacgcaacagactttgcttccagctattccacagcgtttcgttggtggcgcaaatgtcagccacagtcaggcataccagatagcgcagacgattttccgtttgcacttcttcggcaaactgcttgatgacttccgggtcctgaatatcgcggcgttgggcggtcacgctcatcaacaggtgctggcgaaccagccaggcgaccagctgtgtttcgcgactgttcagcccgtggagttcggcaaaatgcactacatcctgagcaccgagaatggagtggtcgccgccgcgtcctttggcgatatcgtgaaacagcgcggcgatgaaaatcagctcagtactcggcaggcgcggccagacgtccacacacaacggatggcgctggcgcgtttcttcactggcaaaactctccagtttcagcatcacgcggatagtatgttcatccaccgtgtaggcgtggaacagatcaaactgcatctgcccgacgatatggctccattgcggcatatacgcgccgagcacgctatggcgatgcattggcaatagcccgcgccgcaccgctccggggtgacgcagaatgctcaaaaacagttttcgtgcttccggaatattacacagcggttgttgcagatggcgacgggcatggcgtaactggcgcagcgtggtggagtaaatgccggtgatcgcactgttgtgcaccatggtgtagaacatacgcaagatggcttccggctggcgcataaatagtgtttcatcacgcaggtcgattagcgtaccgcgtagctgaaactcatcgtcgattggacgtggtttttcgtcggcgggaagggcgaggatggcttcatcgaacagttgcagcagcatctggttgagttcactgacgcggcgtgtaacgcggaagtaatccttcatcatccgctcgaccggttcgttaccttcaccactgtaattcagacgctgggcgacgctaagctggcgatcgaataacaggcgattatcgtaacggctgacgaccagatgcagggcaaagcgaatacgccacaatatatgcagacattcgtttaattccgcccgctccgcactggttaagaagccaaacccgaccatttcatccaggcttgttgcgccaaaatgacggcgggccacccattgcagagtgtggatatcgcgcaagccgccagggctgcttttgatgtctggttcaaggttgtagctggtgccatggtaacgctgatggcgctggttctgttcttcaactttcgccgcgtagaacttgtcggaaggccagaatccttcgctgaaaatatgtttttgcagttcgaggaacagcgcaacatcgccaattaataagcgggattcgattaaattggtggcgacggttaaatcgcttaacccttccagcatgcactcttcaagcgtgcgcacgctatgaccgacttccagctttacatcccagagcagcgttaacagctcgcccactttttgcgcctgatcgtccgggagctttttacggcttaaaatcagtaaatcgacgtcactaagtggatgcagctcgccacgaccgtagccaccgacggcgaccaatgccaggtcggcaatctggctgaatcccgcttcaatccataatcgttgcaggagctggtcgataaactcggtgcgcgcctcaatcaactgttctgcagagatcccattgtcaaaggcatcacccagccaacgctggaaagtatcgatatgggcttttatcccaccgacggttaattcatcacggggccagacgcatggattttgcggttgaccgggcagggtggggagagcggtgtttgcgtactgttctggaagggtattcattgtgcgccacccataagattaaattatcgcattaaaaaagccggcattcgccggcttcatcttattcgtcgtggctgattatcgccgggatggtgtcatccttgcgtagcgtcagaatttcgcagccgttatcagtcaccacaatagtatgctcatattgtgcagacaagctgcgatctttggtttttaccgtccagccatctttcatggtgcggatctcttttttacccgcgttgaccattggctcgatggtgaacgtcatcccaggtttcagtacgacgttggtttcacgggagtcatagtgcagcacctgcggttcttcatggaagccgcgaccaataccgtgtccgcaatattcacgaacgacggagaagccttctgcttcgacaaatttctgaatcgccgcaccgatttcgcgcagattaatgcctggttttaccatgcgtagcgccaggtacaggctttcttgcgtgatgcggcacagacgttcgcccatgatggtcggcttaccgacgataaacattttgctggtatcgccgtggaaaccatctttgattacggtgacatcaatgttaacgatatcgccatctttcagcagcttagcatcgtccgggataccgtggcacaccacttcattaatagagatgcaaacggatttcggatagccgtgatagccgaggcaggcagaaaccgcgtgttgttcattaacaatgtaatcattacagatgcgatccagctcgccggtgctgacgcccggtttaacatacggttcgatcatctccagcacttcggcagccagtcggccagcgacgcgcattttttcgatatcttctggggtcttgatagagatagccattaattctgtccatcagcgtcggtgataccgacaatatatatgtaagtgccgtcaatggtatcacacccgggcaaattgagaatcattctgaatttcgccaaacgtgccactgaaggttttctataatagaaaattcgacgtctgatgctgtacacagcgccaacaattattggtgtccacgacgtatttgtggtataaagcgcgccggacttccgatccatttcgtatacacagactggacggaagcgacaatctcactttgtgtaacaacacacacgtatcggcacatattccggggtgccctttggggtcggtaatatgggatacgtggaggcataaccccaacttttatatagaggttttaatcatggcaactgtttccatgcgcgacatgctcaaggctggtgttcacttcggtcaccagacccgttactggaacccgaaaatgaagccgttcatcttcggtgcgcgtaacaaagttcacatcatcaaccttgagaaaactgtaccgatgttcaacgaagctctggctgaactgaacaagattgcttctcgcaaaggtaaaatccttttcgttggtactaaacgcgctgcaagcgaagcggtgaaagacgctgctctgagctgcgaccagttcttcgtgaaccatcgctggctgggcggtatgctgactaactggaaaaccgttcgtcagtccatcaaacgtctgaaagacctggaaactcagtctcaggacggtactttcgacaagctgaccaagaaagaagcgctgatgcgcactcgtgagctggagaaactggaaaacagcctgggcggtatcaaagacatgggcggtctgccggacgctctgtttgtaatcgatgctgaccacgaacacattgctatcaaagaagcaaacaacctgggtattccggtatttgctatcgttgataccaactctgatccggacggtgttgacttcgttatcccgggtaacgacgacgcaatccgtgctgtgaccctgtacctgggcgctgttgctgcaaccgtacgtgaaggccgttctcaggatctggcttcccaggcggaagaaagcttcgtagaagctgagtaataaggcttgataactcccccaaaatagttcgagttgcagaaaggcggcaagctcgagaattcccgggagcttacatcagtaagtgaccgggatgagcgagcgaagataacgcatctgcggcgcgaaatatgaagggggagagcccttatagaccaggtagtacacgtttggttagggggcctgcatatggccccctttttcacttttatatctgtgcggtttaatgccgggcagatcacatctccgaggattttagaatggctgaaattaccgcatccctggtaaaagagctgcgtgagcgtactggcgcaggcatgatggattgcaaaaaagcactgactgaagctaacggcgacatcgagctggcaatcgaaaacatgcgtaagtccggtgctattaaagcagcgaaaaaagcaggcaacgttgctgctgacggcgtgatcaaaaccaaaatcgacggcaactacggcatcattctggaagttaactgccagactgacttcgttgcaaaagacgctggtttccaggcgttcgcagacaaagttctggacgcagctgttgctggcaaaatcactgacgttgaagttctgaaagcacagttcgaagaagaacgtgttgcgctggtagcgaaaattggtgaaaacatcaacattcgccgcgttgctgcgctggaaggcgacgttctgggttcttatcagcacggtgcgcgtatcggcgttctggttgctgctaaaggcgctgacgaagagctggttaaacacatcgctatgcacgttgctgcaagcaagccagaattcatcaaaccggaagacgtatccgctgaagtggtagaaaaagaataccaggtacagctggatatcgcgatgcagtctggtaagccgaaagaaatcgcagagaaaatggttgaaggccgcatgaagaaattcaccggcgaagtttctctgaccggtcagccgttcgttatggaaccaagcaaaactgttggtcagctgctgaaagagcataacgctgaagtgactggcttcatccgcttcgaagtgggtgaaggcatcgagaaagttgagactgactttgcagcagaagttgctgcgatgtccaagcagtcttaattatcaaaaaggagccgcctgagggcggcttctttttgtgcccatcttgtaaattcagctaacccttgtggggctgcgctgaaaagcgacgtacaatgtcgctagtattaattcatttcaatcgttgacagtctcaggaaagaaacatggctaccaatgcaaaacccgtctataaacgcattctgcttaagttgagtggcgaagctctgcagggcactgaaggcttcggtattgatgcaagcatactggatcgtatggctcaggaaatcaaagaactggttgaactgggtattcaggttggtgtggtgattggtgggggtaacctgttccgtggcgctggtctggcgaaagcgggtatgaaccgcgttgtgggcgaccacatggggatgctggcgaccgtaatgaacggcctggcaatgcgtgatgcactgcaccgcgcctatgtgaacgctcgtctgatgtccgctattccattgaatggcgtgtgcgacagctacagctgggcagaagctatcagcctgttgcgcaacaaccgtgtggtgatcctctccgccggtacaggtaacccgttctttaccaccgacagtgcagcttgcctgcgtggtatcgaaattgaagccgatgtggtgctgaaagcaaccaaagttgacggcgtgtttaccgctgatccggcgaaagatccaaccgcaaccatgtacgagcaactgacttacagcgaagtgctggaaaaagagctgaaagtcatggacctggcggccttcacgctggctcgtgaccataaattaccgattcgtgttttcaatatgaacaaaccgggtgcgctgcgccgtgtggtaatgggtgaaaaagaagggactttaatcacggaataattcccgtgatggataaataagggtaagattccgcgtaagtatcgcgggggcgtaagtctggttataaggcgttattgttgcaggcagtttggtcacggccagcgcgcagcaaccggagcgtacaaaagtacgtgaggatggcgagcactgcccggggccaaaatggcaaataaaatagcctaataatccagacgattacccgtaatatgtttaatcagggctatacttagcacacttccactgtgtgtgactgtctggtctgactgagacaagttttcaaggattcgtaacgtgattagcgatatcagaaaagatgctgaagtacgcatggacaaatgcgtagaagcgttcaaaacccaaatcagcaaaatacgcacgggtcgtgcttctcccagcctgctggatggcattgtcgtggaatattacggcacgccgacgccgctgcgtcagctggcaagcgtaacggtagaagattcccgtacactgaaaatcaacgtgtttgatcgtagtatgtctccggccgttgaaaaagcgattatgacgtccgatcttggcctgaacccgaactctgcgggtagcgacatccgtgttccgctgccgccgctgacggaagaacgtcgtaaagatctgaccaaaatcgttcgtggtgaagcagaacaagcgcgtgttgcagtacgtaacgtgcgtcgtgacgcgaacgacaaagtgaaagcactgttgaaagataaagagatcagcgaagacgacgatcgccgttctcaggacgatgtacagaaactgactgatgctgcaatcaagaaaattgaagcggcgctggcagacaaagaagcagaactgatgcagttctgatttcttgaacgacaaaaacgccgctcagtagatccttgcggatcggctggcggcgttttgctttttattctgtctcaactctggatgtttcatgaagcaactcaccattctgggcagcaccggcagcattggttgcagcacgctggacgtggtgcgccataatcccgaacacttccgcgtagttgcgctggtggcaggcaaaaatgtcactcgcatggtagaacagtgcctggaattctctccccgctatgccgtaatggacgatgaagcgagtgcgaaacttcttaaaacgatgctacagcaacagggtagccgcaccgaagtcttaagtgggcaacaagccgcttgcgatatggcagcgcttgaggatgttgatcaggtgatggcagccattgttggcgctgctgggctgttacctacgcttgctgcgatccgcgcgggtaaaaccattttgctggccaataaagaaagtctggttacctgcggacgtctgtttatggacgccgtaaagcagagcaaagcgcaattgttaccggtcgatagcgaacataacgccatttttcagagtttaccgcaacctatccagcataatctgggatacgctgaccttgagcaaaatggcgtggtgtccattttacttaccgggtctggtggccctttccgtgagacgccattgcgcgatttggcaacaatgacgccggatcaagcctgccgtcatccgaactggagcatggggcgtaaaatttctgtcgatagcgctaccatgatgaacaaaggtctggaatacattgaagcgcgttggctgtttaacgccagcgccagccagatggaagtgctgattcacccgcagagtgtgattcacagtatggtgcgctatcaggacggcagtgttctggcgcagctgggggaaccggatatgcgtacgccaattgcccacaccatggcatggccgaatcgcgtgaactctggcgtgaagccgctcgatttttgcaaactaagtgcgttgacatttgccgcaccggattatgatcgttatccatgcctgaaactggcgatggaggcgttcgaacaaggccaggcagcgacgacagcattgaatgccgcaaacgaaatcaccgttgctgcttttcttgcgcaacaaatccgctttacggatatcgctgcgttgaatttatccgtactggaaaaaatggatatgcgcgaaccacaatgtgtggacgatgtgttatctgttgatgcgaacgcgcgtgaagtcgccagaaaagaggtgatgcgtctcgcaagctgaggataatccggctacagagagtcgcgctatttgttagcgtagggcttcagtgatatagtctgcgccatctgatcgtaagtagttggctttataaggtcagatatgccgtggttttacacggcttttttttgtataggcttcagtattcctgagtaccgtaaaccctgtcagggaataaaaaacgcgtgatgttgtctgctactcaaccacttagcgaaaaattgccagcgcatggctgccgtcatgttgcgatcattatggacggcaatggccgctgggcaaaaaagcaagggaagattcgtgcctttgggcataaagccggggcaaaatccgtccgccgggctgtctcttttgcggccaacaacggtattgaggcgttaacgctgtatgcctttagtagtgaaaactggaaccgaccagcgcaggaagtcagtgcgttaatggaactgtttgtgtgggcgctcgatagcgaagtaaaaagtctgcaccgacataacgtgcgtctgcgtattattggcgataccagtcgctttaacagccgtttgcaagaacgtattcgtaaatctgaagcgctaacagccgggaataccggtctgacgctgaatattgcggcgaactacggtggacgttgggatatagtccagggagtcaggcaactggctgaaaaggtgcagcaaggaaacctgcaaccagatcagatagatgaagagatgctaaaccagcatgtctgtatgcatgaactggcccctgtagatttagtaattaggactgggggggagcatcgcattagtaactttttgctttggcaaattgcctatgccgaactttactttacagatgttctctggcccgatttcgatgaacaagactttgaaggggcgttaaatgcctttgctaatcgagagcgtcgtttcggcggcaccgagcccggtgatgaaacagcctgatgggggtcgcttttgctgaagtatcgcctgatatctgcttttgtgttaatacccgtcgtcatcgcggcgttgtttctgttgccgccggtggggttcgccattgtaacgctggtggtctgcatgctggcagcgtgggaatggggacagcttagcggttttaccactcgtagccagcgagtatggttggcggtgttatgcgggttattgttggcgctgatgctttttctgttgccggaatatcaccgaaatattcatcaaccgctggttgaaatcagtctttgggctagcctgggttggtggattgtcgcgctattgctggtgctgttttacccaggttccgcagcaatctggcgtaactctaaaacattgcgccttatttttggcgtgctaaccattgttcccttcttctggggcatgctggcgttacgggcctggcactatgacgagaatcattacagtggcgcaatatggttgctctatgtcatgatcctggtatggggcgctgactccggcgcatatatgtttggcaaattgtttggtaaacataagctggcaccgaaggtttctccgggtaaaacctggcaaggctttatcggtggactcgctactgcagcggtaatcagttggggttatggcatgtgggcgaatctcgacgtcgctcccgtcaccttactcatttgctctattgtcgcagcgttagccagtgtgctcggcgatctgaccgagagtatgtttaagcgtgaagcaggaattaaggacagcggtcatttaattccaggacacggtggtattttagatcgtattgatagcctgacggctgcggtaccggtctttgcttgcttgttgttactggtattcaggacgctttaacggaaggtaatatgctgagttttctctgggatttggctagcttcatcgttgcactgggtgtacttatcaccgtgcatgaatttggtcatttctgggttgcccggcgttgtggtgttcgcgttgagcgtttcagtatagggtttggtaaggcgctctggcggcgaactgataagctcggcaccgaatatgttatcgccctgatcccgttgggcggttatgtcaaaatgctggatgagcgcgcagaaccggtcgttccggaactccgccaccatgccttcaataataaatctgtcggccaacgagcggcgattattgccgcaggtccggttgcaaacttcatttttgctatctttgcctactggctggtttttattattggtgtgcctggcgtacgtccggtggttggcgaaatagcagccaatagcatagctgcggaagcacaaattgcaccaggtacggaactaaaagccgtagatggtatcgaaacgcctgattgggatgccgtgcgtttgcagttggtcgataaaattggcgatgaaagcaccaccattacagtagcgccatttggcagcgaccaacggcgggatgtaaagctcgatttacgtcactgggcgtttgagcctgataaagaagatccggtatctagcctggggattcgtcctcgtgggccgcaaattgaacctgtactggaaaatgtgcagccaaacagcgcggcaagcaaggcaggtttgcaagcaggcgacaggatcgttaaagtcgatggtcagcccttaacgcagtgggtgacctttgtgatgcttgtccgggataacccgggtaaatccttagcgttagaaatcgaaaggcaggggagtcccttgtctttgacattaatcccggagagtaaaccgggtaatggtaaagcgattggttttgtcggtattgagccgaaagtcattcctttgccagatgagtataaagttgtacgccagtatgggccgttcaacgccatcgtcgaagccacggacaaaacgtggcagctgatgaagctgacggtcagtatgctgggaaaattgatcaccggtgatgtgaaactgaacaacctcagtgggccgatctctatcgccaagggggctgggatgacagcggaactcggggttgtttattacctgccgtttcttgcgcttattagcgtgaacttagggataattaacctgtttccgttgcccgtacttgacggggggcatctgctgttccttgcgatcgaaaagatcaagggcggaccggtatccgagcgggttcaagacttttgttatcgcattggcagcattctgctggtgctgttaatggggcttgcacttttcaatgatttctctcggttatgagagttagttaggaagaacgcataataacgatggcgatgaaaaagttgctcatagcgagcctgctgtttagcagcgccaccgtatacggtgctgaagggttcgtagtgaaagatattcatttcgaaggccttcagcgtgtcgccgttggtgcggccctcctcagtatgccggtgcgcacaggcgacacggttaatgatgaagatatcagtaataccattcgcgctctgtttgctaccggcaactttgaggatgttcgcgtccttcgtgatggtgatacccttctggttcaggtaaaagaacgtccgaccattgccagcattactttctccggtaacaaaagcgtgaaagatgacatgctgaagcaaaacctcgaggcttctggtgtgcgtgtgggcgaatccctcgatcgcaccaccattgccgatatcgagaaaggtctggaagacttctactacagcgtcggtaaatatagcgccagcgtaaaagctgtcgtgaccccgctgccgcgcaaccgtgttgacctaaaactggtgttccaggaaggtgtgagtgctgaaatccagcaaattaacattgttggtaaccatgctttcaccaccgacgaactgatctctcatttccaactgcgtgacgaagtgccgtggtggaacgtggtaggcgatcgtaaataccagaaacagaaactggcgggcgaccttgaaaccctgcgcagctactatctggatcgcggttatgcccgtttcaacatcgactctacccaggtcagtctgacgccagataaaaaaggtatttacgtcacggtgaacatcaccgaaggcgatcagtacaagctttctggcgttgaagtgagcggcaaccttgccgggcactccgctgaaattgagcagctgactaagatcgagccgggtgagctgtataacggcaccaaagtgaccaagatggaagatgacatcaaaaagcttctcggtcgctatggttatgcctatccgcgcgtacagagcatgcccgaaattaacgatgccgacaaaaccgttaaattacgtgtgaacgttgatgcgggtaaccgtttctacgtgcgtaagatccgttttgaaggtaacgataccagcaaagatgccgtcctgcgtcgcgaaatgcgtcagatggaaggtgcatggctggggagcgatctggtcgatcagggtaaggagcgtctgaatcgtctgggcttctttgaaactgtcgataccgatacccaacgtgttccgggtagcccggaccaggttgatgtcgtctacaaggtaaaagagcgcaacaccggtagcttcaactttggtattggttacggtactgaaagtggcgtgagcttccaggctggtgtgcagcaggataactggttaggtacaggttatgctgttggtatcaacgggaccaaaaacgattaccagacctatgctgaactgagcgtaaccaacccgtacttcaccgtagatggcgtaagcctcggtggtcgtctcttctataatgacttccaggcagatgacgccgacctgtccgactataccaacaagagttatggtacagacgtgacgttgggcttcccgattaacgaatataacagcctgcgtgcaggtctgggttatgtacataactccctgtccaacatgcagcctcaggttgcgatgtggcgttatctgtactctatgggtgaacatccgagcacctctgatcaggataacagcttcaaaacggacgacttcacgttcaactatggttggacctataacaagcttgaccgtggttacttcccgacagatggtagtcgtgtcaacctgaccggtaaagtgaccattcctggaagcgataacgaatactacaaagtgacgttagacacggcgacttatgtgccgatcgatgacgatcacaaatgggttgttctggggcgtacccgctggggttatggtgatggtttaggcggcaaagagatgccgttctacgagaacttctatgccggtggttccagcaccgtgcgtggcttccagtccaataccattggtccgaaagcagtttacttcccgcatcaggccagtaattatgatccggactatgattacgaatgtgcgactcaggacggcgcgaaagacctgtgtaaaagcgatgatgctgtaggcggtaacgccatggcggttgccagcctcgagttcatcaccccgacgccgtttattagcgataagtatgctaacagcgttcgtacttccttcttctgggatatgggtaccgtttgggatacaaactgggattccagccaatattctggatatccggactatagtgatccaagcaatatccgtatgtctgcgggtatcgcattacaatggatgtccccattggggccgttggtgttctcctacgcccagccgttcaaaaagtacgatggagacaaggcagaacagttccagtttaacatcggtaaaacctggtaagtgttctccacaaaggaatgtagtggtagtgtagcgatgactttaggcgatcaatataagatcgccgggccacgcaaagaactgcaccctccggtgcaaatgggatggtaaggagtttattgtgaaaaagtggttattagctgcaggtctcggtttagcactggcaacttctgctcaggcggctgacaaaattgcaatcgtcaacatgggcagcctgttccagcaggtagcgcagaaaaccggtgtttctaacacgctggaaaatgagttcaaaggccgtgccagcgaactgcagcgtatggaaaccgatctgcaggctaaaatgaaaaagctgcagtccatgaaagcgggcagcgatcgcactaagctggaaaaagacgtgatggctcagcgccagacttttgctcagaaagcgcaggcttttgagcaggatcgcgcacgtcgttccaacgaagaacgcggcaaactggttactcgtatccagactgctgtgaaatccgttgccaacagccaggatatcgatctggttgttgatgcaaacgccgttgcttacaacagcagcgatgtaaaagacatcactgccgacgtactgaaacaggttaaataagtaatgcctagtattcgactggctgatttagcgcagcagttggatgcagaactacacggtgatggcgatatcgtcatcaccggcgttgcgtccatgcaatctgcacaaacaggtcacattacgttcatggttaacccaaaataccgtgagcatttaggcttgtgccaggcgtccgcggttgtcatgacccaggacgatcttcctttcgcgaaaagtgccgcactggtagtgaagaatccctacctgacttacgcgcgcatggcgcaaattttagataccacgccgcagcccgcgcagaacattgcacccagtgcggtgatcgacgcgacggcgaagctgggtaacaacgtaagcattggcgctaacgcggtgattgagtccggcgttgaactgggcgataacgtgattatcggtgccggttgcttcgtaggtaaaaacagcaaaatcggtgcaggtagccgtctctgggcgaacgtaaccatttaccatgagatccagatcggtcagaattgcctgatccagtccggaacagtggtaggcgcagacggctttggttatgccaacgatcgtggtaactgggtgaagatcccacagattggtcgcgtaattattggcgatcgcgtggagatcggtgcctgcacaaccatcgatcgcggcgcgctggatgacactattattggcaatggcgtgatcattgataaccagtgccagattgcacataacgtcgtgattggcgacaatacggcggttgccggtggcgtcattatggcgggcagcctgaaaattggtcgttactgcatgatcggcggagccagcgtaatcaacgggcatatggaaatatgcgacaaagtgacggttacgggcatgggtatggtgatgcgtcccatcactgaaccaggcgtctattccagtggcattccgctgcaacccaacaaagtctggcgcaaaaccgctgcactggtgatgaacattgatgacatgagcaagcgtctgaaaagccttgagcgcaaggttaatcaacaagactaacgttccatcttttgttcgccaaactttacggcctgtctcattcttacgattgcggcaggccgtgttattattgtcgtttcttatattttgacaggaagagtatcttgactactaacactcatactctgcagattgaagagattttagaacttctgccgcaccgtttcccgttcttactggtggatcgcgtgctggattttgaagaaggtcgttttctgcgcgcagtaaaaaatgtctctgtcaatgagccattcttccagggccatttccctggaaagccgattttcccgggtgtgctgattctggaagcaatggcacaggcaacaggtattctggcgtttaaaagcgtaggaaaactggaaccgggtgagctgtactacttcgctggtattgacgaagcgcgcttcaagcgcccggtcgtgcctggcgatcaaatgatcatggaagtcactttcgaaaaaacgcgccgcggcctgacccgttttaaaggggttgctctggtcgatggtaaagtagtttgcgaagcaacgatgatgtgtgctcgtagccgggaggcctgatacgtgattgataaatccgcctttgtgcatccaaccgccattgtggaagagggcgcgagtattggcgcgaacgcacacattggtcctttttgtatcgttggaccccatgtcgaaattggtgagggtaccgtactgaaatctcacgttgtcgtgaatggtcatactaaaattggccgcgataatgagatttatcagttcgcctccatcggcgaagttaaccaggatctgaaatatgctggcgaaccgacccgtgtggaaatcggcgatcgtaaccgcattcgcgaaagcgtcaccattcatcgtggcacagtccagggcggtggattgacgaaggtgggcagcgacaacttactgatgatcaacgcgcacattgcgcacgattgtacggtaggtaaccgctgtattctcgccaacaacgcaacgctggcgggtcacgtaagcgttgacgacttcgcgatcatcggcggcatgaccgcagtccatcagttctgcatcattggtgcgcacgtgatggttggcggctgctccggtgtggcgcaggacgtccctccttatgtcattgcgcagggtaaccacgcaacgccgttcggtgtcaatatcgaagggctgaagcgccgcggattcagccgtgaggcgattaccgctatccgcaatgcgtataagctgatttatcgtagcggtaaaacgctcgatgaagtgaaaccggaaattgctgaactggcggaaacatatccggaagtgaaagcctttaccgatttctttgcacgcagtacgcgcggtctgattcgttaatgactgaacagcgtccattaacgattgccctggtcgccggagaaacctccggcgatatcctgggggccggtttaatccgcgctctgaaagaacatgtgcccaacgcccgctttgttggtgttgccgggccacgaatgcaggctgaaggctgcgaagcctggtacgaaatggaagaactggcggtgatgggcattgttgaagtgctcggtcgtctgcgtcgcttactgcatattcgtgccgatctgacaaagcgttttggcgaactgaagccagatgtttttgttggtattgatgcgcctgacttcaatattactcttgaaggtaacctcaaaaagcagggtatcaaaaccattcattacgtcagtccgagtgtctgggcgtggcgacagaaacgtgttttcaaaataggcagagccaccgatctggtgctcgcatttctgcctttcgaaaaagcgttttatgacaaatacaacgtaccgtgccgctttatcggtcataccatggctgatgccatgccattagatccagataaaaatgccgcccgtgatgtgctggggatccctcacgatgcccactgcctggcgttgctaccggggagccgtggtgcagaagttgaaatgcttagtgccgatttcctgaaaacggcccagcttttgcgccagacatatccggatctcgaaatcgtggtgccactggtgaatgccaaacgccgcgagcagtttgaacgcatcaaagctgaagtcgcgccagaccttagtgttcatttgctggatgggatgggccgtgaggcgatggtcgccagcgatgcggcgctactggcgagcggtacggcagccctggagtgtatgctggcgaaatgcccgatggtggtgggatatcgcatgaagccttttaccttctggttggcgaagcggctggtgaaaactgattatgtcagcctgccaaatctgctggcgggcagagagttagtcaaagaattattgcaggaagagtgtgagccgcaaaaactggctgcggcgctgttaccgctgttggcgaacgggaaaaccagccacgcgatgcacgataccttccgtgaactgcatcagcagatccgctgcaatgccgatgagcaggcggcacaagccgttctggagttagcacaatgatcgaatttgtttatccgcacacgcagctggttgcgggtgtggatgaagtcggacgcgggccgttagttggcgcggtcgtcaccgctgcggtgatccttgacccggcgcgcccgattgccgggctgaatgattccaaaaagctgagcgaaaaacgccgtctggcgctctatgaagagatcaaagagaaagcgttgagctggagtctgggccgcgcggaaccccacgaaatcgacgagctgaacattcttcatgcgaccatgctggcgatgcagcgtgccgtcgctgggctgcatattgcgccggaatatgtgttgattgatggtaaccgctgcccgaaattaccgatgcctgcgatggctgtggtgaaaggcgatagccgcgtaccggaaatcagtgccgcgtctatcctggcgaaagtgacgcgtgacgccgaaatggcggcgctggatattgttttcccgcaatatggttttgcccaacacaaagggtacccaaccgcttttcatctggaaaaactggctgaacacggcgcgaccgaacaccatcggcgcagctttgggcctgtcaaacgcgcactgggacttgcgtcctgattcttgtgtcgagattaagtaaaccggaatctgaagatgtctgaaccacgtttcgtacacctgcgggtgcacagcgactacagcatgatcgatggcctggccaaaaccgcaccgttggtaaaaaaggcggcggcgttgggtatgccagcactggcgatcaccgatttcaccaacctttgtggtctggtgaagttctacggagcgggacatggcgcagggattaagcctatcgtcggggcagattttaacgtccagtgcgacctgctgggtgatgagttaacccacctgacggtactggcggcgaacaataccggctatcagaatctgacgttgctgatcagtaaagcgtatcagcgcgggtacggtgccgccgggccgatcatcgatcgcgactggcttatcgaattaaacgaagggttgatccttctttccggcggacgcatgggcgacgtcggacgcagtcttttgcgtggtaacagcgcgctggtagatgagtgtgtcgcgttttatgaagaacacttcccggatcgctattttctcgagctgatccgcaccggcaggccggatgaagaaagctatctgcacgcggcggtggaactggcggaagcgcgcggtttgcccgtcgtggcgaccaacgacgtgcgctttatcgacagcagcgactttgacgcacacgaaatccgcgtcgcgatccacgacggctttaccctcgacgatcctaaacgcccgcgtaactatagcccgcagcaatatatgcgtagcgaagaggagatgtgtgagctgtttgccgacatccccgaagcccttgccaacaccgttgagatcgccaaacgctgtaacgtaaccgtgcgtcttggtgaatacttcctgccgcagttcccgaccggggacatgagcaccgaagattatctggtcaagcgtgcaaaagagggcctggaagagcgtctggcctttttattccctgatgaggaagaacgtcttaagcgccgcccggaatatgacgaacgtctggagactgaacttcaggttatcaaccagatgggcttcccgggctacttcctcatcgttatggaatttatccagtggagcaaagataacggcgtaccggtagggccaggccgtggctccggtgcgggtagtctggtggcctacgcgctgaaaatcaccgacctcgatccgctggaatttgacctgctgttcgaacgtttccttaacccggaacgtgtctccatgcctgacttcgacgttgacttctgtatggagaaacgcgatcaggttatcgagcacgtagcggacatgtacggtcgtgatgcggtaagccagatcatcaccttcggtacaatggcggcgaaagcggtgatccgcgacgtaggccgcgtgctggggcatccgtacggctttgtcgatcgtatcagcaaactgatcccgcccgatccggggatgacgctggcgaaagcgtttgaagccgagccgcagctgccggaaatctacgaagcggatgaagaagttaaggcgctgatcgacatggcgcgcaaactggaaggggtcacccgtaacgccggtaagcacgccggtggggtggttatcgcgccgaccaaaattaccgattttgcgccgctttactgcgatgaagagggcaaacatccggtcacccagtttgataaaagcgacgttgaatacgccggactggtgaagttcgacttccttggtttgcgtacgctcaccatcatcaactgggcgctggagatgatcaacaagcggcgggcgaagaatggcgagccgccgctggatatcgctgcgatcccgctggatgataagaaaagcttcgacatgctgcaacgcagcgaaaccacggcggtattccagcttgaaagccgcggcatgaaggacctgatcaagcgtctacaacctgactgcttcgaagatatgatcgccctagtggcactgttccgccccggtccgttgcaaagtgggatggtggataactttatcgaccgtaaacatggtcgtgaagagatctcctatccggacgtacagtggcagcatgaaagcctgaaaccggtactggagccaacctacggcattatcctgtatcaggaacaggtcatgcagattgcgcaggtgctttctggttataccctcggtggcgcggatatgctgcgtcgtgcgatgggtaagaaaaagccggaagagatggctaagcaacgttctgtatttgctgaaggtgcagaaaagaacggaatcaacgctgaactggcgatgaaaatcttcgacctggtggagaaattcgctggttacggatttaacaaaagccactctgcggcctatgctttggtgagttatcaagcgttatggctgaaagcgcactatcctgcggagtttatggcggcggtaatgaccgccgatatggacaacaccgagaaggtggtgggtctggtggatgagtgctggcggatggggctgaaaatcctgccaccagatataaactccggtctttaccatttccacgtcaacgacgacggcgaaatcgtgtatggtattggcgcgatcaaaggggtcggtgaaggtccgattgaggccatcatcgaagcccgtaataaaggcggctacttccgcgaactgtttgatctctgcgcccgtaccgacaccaaaaagttgaaccgtcgcgtgctggaaaaactgatcatgtccggggcgtttgaccgtcttgggccacatcgcgcagcgctgatgaacagcctgggcgatgcgttaaaagcggcagatcaacacgcgaaagcggaagctatcggtcaggccgatatgttcggcgtgctggccgaagagccggaacaaattgaacaatcctacgccagctgccaaccgtggccggagcaggtggtattagatggggaacgtgaaacgttaggcctgtacctgaccggacaccctatcaaccagtatttaaaagagattgagcgttatgtcggaggcgtaaggctgaaagacatgcacccgacagaacgtggtaaagtcatcacggctgcggggctcgttgttgccgcgcgggttatggtcaccaagcgcggcaatcgtatcggtatctgcacgctggatgaccgttccgggcggctggaagtgatgttgtttactgacgccctggataaataccagcaattgctggaaaaagaccgcatacttatcgtcagcggacaggtcagctttgatgacttcagcggtgggcttaaaatgaccgctcgcgaagtgatggatattgacgaagcccgggaaaaatatgctcgcgggcttgctatcagcctgacggacaggcaaattgatgaccagcttttaaaccgactccgtcagtctctggaaccccaccgctctgggacaattccagtacatctctactatcagagggcggatgcacgcgcgcggttgcgttttggcgcgacgtggcgtgtctctccgagcgatcgtttattaaacgatctccgtggcctcattggtagcgagcaggtggaactggagtttgactaatacaggaatactatgagtctgaatttccttgattttgaacagccgattgcagagctggaagcgaaaatcgattctctgactgcggttagccgtcaggatgagaaactggatattaacatcgatgaagaagtgcatcgtctgcgtgaaaaaagcgtagaactgacacgtaaaatcttcgccgatctcggtgcatggcagattgcgcaactggcacgccatccacagcgtccttataccctggattacgttcgcctggcatttgatgaatttgacgaactggctggcgaccgcgcgtatgcagacgataaagctatcgtcggtggtatcgcccgtctcgatggtcgtccggtgatgatcattggtcatcaaaaaggtcgtgaaaccaaagaaaaaattcgccgtaactttggtatgccagcgccagaaggttaccgcaaagcactgcgtctgatgcaaatggctgaacgctttaagatgcctatcatcacctttatcgacaccccgggggcttatcctggcgtgggcgcagaagagcgtggtcagtctgaagccattgcacgcaacctgcgtgaaatgtctcgcctcggcgtaccggtagtttgtacggttatcggtgaaggtggttctggcggtgcgctggcgattggcgtgggcgataaagtgaatatgctgcaatacagcacctattccgttatcagcccggaaggttgtgcgtccattctgtggaagagcgccgacaaagcgccgctggcggctgaagcgatgggtatcattgctccgcgtctgaaagaactgaaactgatcgactccatcatcccggaaccactgggtggtgctcaccgtaacccggaagcgatggcggcaagcttgaaagcgcaactgctggcggatctggccgatctcgacgtgttaagcactgaagatttaaaaaatcgtcgttatcagcgcctgatgagctacggttacgcgtaattcgcaaaagttctgaaaaagggtcacttcggtggcccttttttatcgccacggtttgagcaggctatgattaaggaaggattttccaggaggaacacatgaacatcattgccattatgggaccgcatggcgtcttttataaagatgagcccatcaaagaactggagagcgcgctggtggcgcaaggctttcagattatctggccacaaaacagcgttgatttgctgaaatttatcgagcataaccctcgaatttgcggcgtgatttttgactgggatgagtacagtctcgatttatgtagcgatatcaatcagcttaatgaatatctcccgctttatgccttcatcaacacccacagcacgatggatgtcagcgtgcaggatatgcggatggcgctctggttttttgaatatgcgctggggcaggcggaagatatcgccattcgtatgcgtcagtacaccgacgaatatcttgataacattacaccgccgttcacgaaagccttgtttacctacgtcaaagagcggaagtacaccttttgtacgccggggcatatgggcggcaccgcatatcaaaaaagcccggttggctgtctgttttatgatttttcggcgggaatactcttaaggctgatgtctctattagcgtcaccgagcttggtagcttgctcgaccacaccgggccacacctggaagcggaagagtacatcgcgcggacttttggcgcggaacagagttatatcgttaccaacggaacaagcacgagcaacaaaattgtgggtatgtacgccgcgccatccggcagtacgctgttgatcgaccgcaattgtcataaaagcctggcgcatctgttgatgatgaacgatgtagtgccagtctggctgaaaccgacgcgtaatgcgttggggattcttggtgggatcccgcgccgtgaatttactcgcgacagcatcgaagagaaagtcgctgctaccacgcaagcacaatggccggttcatgcggtgatcaccaactccacctatgatggcttgctctacaacaccgactggatcaaacagacgctggatgtcccgagcattcacttcgattctgcctgggtgccgtacacccattttcatccgatctaccagggtaaaagtggtatgagcggcgagcgtgttgcgggaaaagtgatcttcgaaacgcaaagcacccacaaaatgctggcggcgttaagccaggctagcctgatccacattaaaggcgagtatgacgaagaggcctttaacgaagcctttatgatgcataccaccaccagccccagttatcccattgttgctagcgttgagacggcggcggcgatgctgcgtggtaatccgggcaaacggctgattaaccgtagtgtagaacgagctctgcattttcgcaaagaggtccagcggctgcgggaagagtctgacggttggtttttcgatatctggcaaccgccgcaggtggatgaagccgaatgctggcccgttgcgcctggcgaacagtggcacggctttaacgatgcggatgccgatcatatgtttctcgatccggttaaagtcactattttgacaccggggatggacgagcagggcaatatgagcgaggaggggatcccggcggcgctggtagcaaaattcctcgacgaacgtgggatcgtagtagagaaaaccggcccttataacctgctgtttctctttagtattggcatcgataaaaccaaagcaatgggattattgcgtgggttgacggaattcaaacgctcttacgatctcaacctgcggatcaaaaatatgctacccgatctctatgcagaagatcccgatttctaccgcaatatgcgtattcaggatctggcacaagggatccataagctgattcgtaaacacgatcttcccggtttgatgttgcgggcattcgatactttgccggagatgatcatgacgccacatcaggcatggcaacgacaaattaaaggcgaagtagaaaccattgcgctggaacaactggtcggtagagtaagcgcaaatatgatcctgccttatccaccgggcgtaccgctgttgatgcctggagaaatgctgaccaaagagagccgcacagtactcgattttctactgatgctttgttccgtcgggcaacattaccccggttttgaaacggatattcacggcgcgaaacaggacgaagacggcgtttaccgcgtacgagtcctaaaaatggcgggataacttgccagagcggcttccgggcgagtaacgtgctgttaacaaataaaggagacgttatgctgggtttaaaacaggttcaccatattgcgattattgcgacggattatgcggtgagcaaagctttctactgcgatattcttggtttcacgctgcaaagcgaagtctatcgcgaagcgcgcgacagttggaaaggggatttggcgcttaatgggcaatatgtgattgagcttttcagttttccgttcccgccggaacgacccagccgaccggaagcttgcggtctgcgtcatctggcttttagcgttgatgacatcgatgcggcagtggcgcaccttgaaagccataacgtgaagtgtgaaaccatccgtgtcgatccatacacgcaaaaacgcttcaccttctttaacgatccggacgggctgccgttggaactgtatgagcagtaaggcttgtcatcgccgcatttgcccggtaacgtgccgggcattgctactgtaaaatcgcaccatcatgacactcacgctcaatagacaacttctcaccagtcgccagattctggtggcctttagcggcgggcttgactccaccgttctgctgcatcagttggtgcagtggcggacggaaaatccgggtgtcgctctgcgcgctattcatgtgcatcacggtttaagtgccaatgccgatgcctgggttacgcattgcgaaaacgtctgccaacagtggcaggtgccgctggtggtcgaacgcgtacaacttgcgcaagaaggactgggcattgaggcccaggcgcggcaggcacgttatcaggcatttgcccgcaccttgttgcccggtgaagtgctggtcaccgcgcaacatctcgacgatcaatgtgaaacctttctgctggcgctaaaacgcggcagtggccctgccgggcttagcgctatggcggaagtcagcgagtttgccggaacgcggcttattcgcccgttgctcgcccgcacgcggggggaactggtgcagtgggcgcgtcagtatgatttacgctggattgaagacgaaagtaatcaggacgacagttacgatcgtaactttctgcgcctgcgcgtagtgccgttattgcagcagcgttggccgcattttgccgaagcaacggcccgcagcgccgcactttgtgctgaacaagagagcctgctggatgaactgctggcagatgatttagcacactgtcaaagcccgcaggggacgctgcagattgtgccaatgctggcgatgagtgatgcccgccgcgcggcgattatccgccgctggctggcagggcagaatgcaccgatgccttcccgcgacgcgttggtgaggatctggcaggaagtggcgctggcgcgggaagatgccagtccctgtttacgtttgggcgcgtttgaaatccgacgctatcagagccaactgtggtggattaaatccgtcaccgggcaaagcgaaaacattgtgccgtggcagacgtggcttcaaccgctggaattaccggcggggctgggaagtgtacagcttaatgcgggaggcgatattcgccctccgcgtgcagacgaagcggtcagcgtgcgtttcaaagcgccaggattgctgcatattgtcgggcgtaacggcggacgtaagctaaagaaaatctggcaagagctgggcgtgccgccgtggctacgtgacaccacgccactgctgttttatggcgaaacgctgattgcggcggcaggggtatttgtgacgcaagaaggtgtggctgaaggtgagaatggcgtaagttttgtctggcagaaaacgcttagttaagtgaaagccggataagacgcatcaaacgtcgcatccggcgaaagtcaatcaggattcgcttaccaccaccgtaccgatttccgggtggctaaagctggtaattttatccagacgcagctcgcgggtttcgccagcggcctcgacgaccaggtactccacatttttgcgggagactaaatcactggcttttgcctgcaatttttcgccatctttcagctcaagtgtcagcattaaatgatgctggcaggcgagctcaagattatcgtaatcatcacaattgattggttgatacgtatcattcattgacataatcgctcaccagtaagtttgccgcagcgtatgctgctttttccctgacagcctcagaaagggcgtcgtcggcagccatttcattcagcactttcaaaacgcagcccagcgcgtccggaacgtatcctaagtctccgctggcgatttccgcgtaccgcttgcgtattaactcacaatatttttccacatgccctcctgtcagcactctgacttaaccgtggatgcaagtctaagcctacgaagataaactctgtttcgcaaggtgactataccacactcatttctgcaatatcagcgccgcaactgcacgtattccgttacaatggcctcctgattcgaaaggagttttcttatggcgcttaaagcgacaatttataaagcgacggttaatgtggccgatctcgaccgcaaccagtttctcgatgcctctctgacgctggcgcgccatcctagtgaaacccaggagcgtatgatgctgcgcttgctggcgtggctgaaatatgctgatgaacgtctgcaatttacccgtggtttgtgtgccgatgatgagccggaagcgtggctgcgtaacgatcacctgggcattgatttgtggattgagctggggctgccggatgagcggcggattaagaaagcctgcacccaggccgcagaagtggcgctgtttacctataatagtcgggcggcgcaaatctggtggcagcaaaatcagagcaaatgtgtgcagtttgccaatctttccgtctggtatctggacgatgaacaactggcgaaagtaagcgcctttgccgatcgtaccatgacgctgcaggcaacgattcaggatggcgtgatctggttaagcgatgataagaataatctggaagtgaacttaaccgcctggcaacaacctagttgaactaaaccgcctggcaacaaccttcatgattgtgatttcccgacatgttgctattcccgatggtgagcttgagatcaccgccattcgtgcgcagggcgcgggcgggcagcatgttaataagaccagtacggctattcatctgcgttttgacattcgggcgtccagcctgccagagtattacaaagagcgtctgctcgccgccagccatcatttgatcagcagtgatggcgtgattgtcattaaggcacaggaataccgcagtcaggaactgaaccgcgaagcagctctggcccggctggtggctatgattaaagaattaacaacagaaaaaaaagcccgacgacccacgcggcccacccgtgcaagcaaagagcgcaggctggcaagcaaagcacaaaaaagtagcgtgaaggcgatgcgcggcaaagtgcgcagcggtcgggaataaaaagaaggaatggatggtgaaaaaagcgatagtgacagcgatggctgtaatcagcctctttactctgatgggatgtaataatcgggccgaagtcgatacgctttctccggcgcaggctgccgaactgaaaccgatgccgcaaagttggcgcggcgtgctgccgtgtgccgattgcgaaggaatcgaaacctctctgttcctcgaaaaagacggaacatgggtgatgaatgagcgttatctcggtgctcgtgaagaaccttcctccttcgcttcctacggtacatgggcgcgaaccgctgacaagctggtattaaccgacagcaaaggtgaaaagagttattatcgggcgaaaggcgatgcgctggagatgctcgatcgtgaaggcaatccgattgaaagccagttcaactatacgctggaagcggcacaatccagtttacctatgacgccgatgaccctgcggggcatgtatttttatatggctgatgcggcgaccttcactgattgcgcgaccggaaaacgtttcatggtagcgaataacgcagagctggagcgtagctacctggctgcgcgcggtcacagtgaaaaaccggtgttactgagtgtagaaggtcactttacgcttgagggtaatccggataccggtgcgccgactaaagtattggcacccgatacggcagggaaattttaccccaaccaggattgcagtagtttggggcagtaacccgtcttgagacagaaacaaacgcaaaacaggccagaaggatatatttcaacattttgaatttgcacgttttttgtaggccggataaggcgtttacgccgcatccggcaatggtgctcaacgcctgatgcgacgctggcgcgtcttatcatgcctacgacccccctcataccttaaggcggataaggcatttactttatcaccgggtcaaaccaacaaagcgacccgccttgatataaatcccaggcttcaggtgcccaacatactgtaactgcgtttctggcttaaacgcagagacatcaccaatacgcatatgcatcagatcggcagggctaatccagccgctttgcgccagtgtaagtggatgcccggctttggcaaaggcatccgtgacaaattcgctacaaaaccagctctttttgtctccttcgcccacactgcttaactgcgctttcgccaggccgctgacgcactgttggcgaaaatcctcggagaacggattcagactgcacatctggcgagtcaccataaagggaataaattcgacaatgccgcgatagttataaccgctatctttgattttattggcaaacgcggtgatatctgtggcttgttgcggggtaagatccgggactcgtaagacgaaaagcttatcactatgcttcatcgcttttttaagggaaacgatctggacgccagcgcctgtcgcttctgcaacgttattatcacccagaaagattgcaacgtgactcacagaggaagtgctgaagacgcggattccaaaactggttaccccaaggctactggagaacagcaaatcgccgggtttgagatcaggtgccgttatttcttttatactttgttcggtgaaagagctttgatgctggaatttgacagcccatgtttttgcctcggcatctactgctgtggcacttgggtctggctggctgatatcaacggtacaagcgctaagtaaaagaaagctggggagaaacaggcggcagtacgcctttggtttatccattttatacaatccatgtaaaaaaagggccctgaaattcaggaccctttctggcatcagcctttaatctgtttcaccagatattcgacgatgtcaccagtcttaattaactgtttctcgccgttgcgacgatatttatattcgatatcgtcgttgtcgaggttacggtcgcccagcacaatagtgtgcggaataccgatcagttccatatcagcaaacatcacgcccggacgctctttgcggtcatccagcagcacttcgataccttgtgcacgcagttcgctgtacagtttctcagcaagctcttgtacgcggaaggatttgtgcatgttcatcggcagaatcgccacctggaacggcgcgatagcgtcaggccatacgatgcctcgttcgtcgtagttctgctcaatcgccgcagctaccacacgcgttaccccgataccgtagcaacccatcgtcaggatttggttgcggccatcttcaccctgtacggaggctttcagtgcttcggagtacttggtacccagctggaagatgtgaccaacttcgataccacgtttgatcagcagcctaccctggccatccgggcttggatcgccagccaccacgttacggatatctgcaacttccggggtagcgacatcgcgatcccagttgatgccgaagtagtgtttaccatcgatgttagcaccagcagcgaaatcactcatcgccgcaacggtacggtcaatcaccaccggaatcggcatgtttaccggacccagactacccggaccggctttaaccacggcacgaatttcttcttcggtcgcgaaagtcagcgggcttgcaacctgcggcagtttttctgctttaacttcgttcagctcgtgatcaccgcgcaccagcagcgcaacctgcgggaagctgctgccttcaaccgctttaaccagcagagtcttaaccgttttctcaatcggcagattgaactgttcaaccagttccgcgatggttttcgcgttcggcgtatcaaccagcgtcatttcctgggtagcagcagcgcgcggttctttcggcgcgatagcttctgccagttcaatgttcgctgcatagtcagaggtgtcggagaagaccacatcgtcttcaccgctctgcgccagcacctggaattcgtgagaggcgctgccgccgatagaaccggtgtcggcttgtacggcgcggaaatccagccccatgcggctgaagattttgctgtaggccgcatacattgcatcgtaggtttcctgcagggattcctgagaagtatggaaagagtaagcatctttcatcaggaattcgcgggaacgcatgacgccgaaacgcggacgcacttcgtcgcggaacttggtctggatctgatagaagttcagcggcagctgtttgtaagagctaagctcgttacgaatcaggtcagtgataacttcttcatgagttgggccgagtacgaacggacgctcgccacggtcaacaaaacgcagcagttccggaccgtactgttcccaacgaccactctcttgccacaaatcggctggctgaaccaccggcatgctcacctcgatcgcaccggcgttgttcatctcttcacgcacgatgttttcgacttttttcagaacgcgcacgccggtcggcagccaggtatataacccggaggccagcttgcggatcatcccggcgcgcagcatcagctgatggctgatcacctcggcgtcggcaggtgtctccttgagagtggagagcaggtattggctagtacgcatgttgttacggttccagttggaaggtagaacaggctcaaggcgagcctgggacaaaaaaagtgatttagtttaccagtgcaaaagaaatgtcaaaagagaagggcgtgaatttaacgcggttccagcgcaaagacttcaaaacctgcgtcggtgacgcgccagcgaacgttaaaatcatgtagccagacggcataggttttgcccgtttcctcacctttacgataggccgggcgcgggtcctgcgccagtacttcgcggataaacagcgttaactgcggataacgcttctccagcgtcaaaagctgcttttcgacctctgcggtaaaactcaccgccatctctgcagctggcgcactttgcgcatagctggcactggcatcgggaaggctttcggcaaaggggagatacggtttgatatccactaccggcgtaccatcgaccagatccagactgccgagcttcagaatcacgctgtctttatggcaaacaacctctttcagctctaccaggctcatgccaattgggttagggcggaaagtagagcgtgttgcgaaaacccccattctggcgttaccgccgaggcgcggtggacgcacagtcggacgccagccgccttccatcgtttgatgaaagacgaaaaggatccataaatggctgaacgcttccaggccgcgaacggcgtcggcctggttgtagggagcaatgagatgcagttcgccgttggcgctttttaccagacctggctggcgcggaacggcgaacttttctttataggggctgcgaataacgcctatttgctcgaactggaaactgctcatttcgccgtaatgttaagcgcagaaccgatacatacagcctgacgatagcagcctggcgtaccgctggtgacttcgcagctatgcagtaatacagcattggctttcattttagaggcgttgatttgcatccgcttacgtgcggttggaatgctcggcggagagtcctgattagaggcctggcaagagtcgccactgacttcaccgagatcgcggaacggtttgccgactaattcttctgcattggtataaattcggaccggcgtggcgcgcggcgctttcggttttgcaggctccgctttcggctggggtgcagtgctttgaacgggttcgacaggggatctgcttaacatggaacagccgcttagcatgagtgctactaaacagatcggtaaagcacgcatagtatttcctcaatgtatgatcaaaacgtcaatattgaatcaggagcttgtaaaaatgacaagacgggcaagcgcccgtcctgaatgatattacaaattgtggaaacagcctaaaaattaccagcctttaacagctccgccgttaaacactttgtttgctgcttcgtaaacttcgtcagactgataagcctggacgaatttcttcacgttctcggcgtctttgttatcttcacgcgtcacgatcaggtttacgtacggggactctttatcttcaacaaagataccgtctttcgccggagtcaggccaatctggctggcataggtggtattgataactgccagagcgatttgcgcgtcgtccagagaacgcggcagttgcggtgcttccagttcaacaattttcagatttttggggttctcaacaacatcaagaacggtcggcagcaggccaacgccatctttcagtttgatcaagcccactttttgcagcagcagcagactacgaccaaggttagttgggtcgtttggcacggcaacctggctaccatcctgcagttcatccagacttttgattttcttggagtaaccagcaatcggataaacaaaagtgttgcctactgcgaccagtttgtagccacgatctttcagttgctgatcaaggtacggtttatgctggaaggcgttggcgtcgatatcgcctttgctcaatgcttcgtttggcagaacatagtcgttgaaggttaccagctcaacgtccaggccatatttgtctttcgcaactttctgcgcgacttctgcaacctgctgttcggcaccaacaatcacgccgactttaatgtggtttggatctttttcatcctgaccgcagcctaccagtgccagacttccgatcagggctcccactgccgcaaaggttttgaatttgaacgccataccttattccttcttcaattatttatgttgtgttgaacgttacttgcgagtgacagcccggacgatgcggtcgcctgcgaactgaattaaataaaccagaatgaccagcaataccagtaccgtattcatcaccgtcgcgttatagccgatgtagccatactgatagccaatctgacctaaaccaccggcaccgactgcaccacccatcgcggaataaccgaccagggtaatcagggtgatagttgccgcattcaccagacccggcagcgcttccggtaacagcaccttacggacgatctgcatcggcgtggcacccattgcgcgggaagcttcaattaacccggttgggatctccagcagagcgttctcgaccatacgggcaataaacggtgctgcaccaacggttaacggaacaatcgctgcctgcaaaccaatgcttgtaccgacaataacgcgggtaaacggaatcatccatacaagcaagataatgaacgggatggaacggaaaatgttcacaatcgcagaaacggtacgatacagcttcgcgttagcaataatttgccccggacgcgtgacataaagcagaacgccaaccggcagaccaatcacaaagccaaaaaaaccggatacgaaggtcattgccagcgtttcccatacgccacgaaccagcagccacatcatcggctcagacataacccagtacctctacttttacatggtgttcctgcagccaggcaatggcggcttgcgtatcttgttgtgtgccgtgcatttcagtcagcatgatgccgaacttaacgccaccggcgtaatccatctgcgcgctaataatgttgttgttgacgttgaaacgacgcgcggtttcagaaagcagtggggcatcgacgctttgaccggtaaactccagacgcagcatcggcacgcagtcagtaaatggctccgcttgcagacgttcctggtaatcttccgggatatccagatgcagggtgctctgaataaacttctgcgccagcggcgttttcggatggctgaacacttcacttaccgtgtcctgctcgatcagttctccattgctgatgaccgccacgcaatcacaaatgcgcttcacaacgtccatttcgtgggtgatcaacagaatcgtcaaccccagacggcggttgatgtctttcagcagttcgagaatagaacgtgtcgttgccgggtccagcgcgctggtggcttcatcacacagcaatactttgggattgctggctaacgcacgggcaattgccacacgttgtttctgcccaccggaaagattgctcgggtagctatcatgcttatcgccaagaccaaccaaactcagcaattccgtcacgcgacgtttgacctcgtctttcggtgtgttgtccagctccagcggcagagccacgttgccaaaaacagtacggctagagagcaggttaaaatgctggaaaatcataccaatctggcggcgagctttggtcaactcggattcactcagcgtggtcagttcctggccatcgaccagcacgctaccctcggttgggcgctccagcaggtttacacaacgtataagcgtactcttacccgcgccactggcaccgataacgccataaatttgtccagctggcacatgcaggctgacgttgttcaacgcctggatggtgcgggtgccctggtggaacactttggtgatattgctaagttttatcattgattatttattatcgtcattaagttagtcgtggcatctcgaatgcctgaaacgggcaacgccgtcaatgaaatggatgttaaggcatccagacgtctaaatcaatcaggtttatgcgaagagcactttcttgcaggtcgaaacatgcgatactagcgtcacatgccttattaaggagctataaaaggtggcgaagagcgtacccgcaatttttcttgaccgtgatggcaccattaatgtcgatcacggctatgtccatgagatcgacaactttgaatttatcgacggtgttattgacgccatgcgcgagctaaaaaaaatgggctttgcgctggtggtagtaaccaaccagtctggcattgctcgcggtaaatttaccgaagcacagtttgaaacgctgaccgagtggatggactggagcctggcggaccgagatgtcgatctggatggtatctattattgcccgcatcatccgcagggtagtgttgaagagtttcgccaggtctgcgattgccgcaaaccacatccggggatgcttttgagtgcacgcgattatttgcatattgatatggccgcttcttatatggtgggcgataaattagaagatatgcaggcagcggttgcggcgaacgtgggaacaaaagtgctggtgcgtacgggtaaacctattacgcctgaagcagaaaacgcggcggattgggtgttaaatagcctggcagacctgccgcaagcgataaaaaagcagcaaaaaccggcacaatgattaaaagatgagcggttgaaataaaaatgcatttttccgcttgtcttcctgagccgactccctataatgcgcctccatcgacacggcggatgtgaatcacttcacacaaacagccggttcggttgaagagaaaaatcctgaaattcagggttgactctgaaagaggaaagcgtaatatacgccacctcgcgacagtgagctgaaagccgcgtcgcaactgctctttaacaatttatcagacaatctgtgtgggcactcgaagatacggattcttaacgtcgcaagacgaaaaatgaataccaagtctcaagagtgaacacgtaattcattacaaagtttaattctttgagcatcaaacttttaaattgaagagtttgatcatggctcagattgaacgctggcggcaggcctaacacatgcaagtcgaacggtaacaggaagaagcttgcttctttgctgacgagtggcggacgggtgagtaatgtctgggaaactgcctgatggagggggataactactggaaacggtagctaataccgcataacgtcgcaagaccaaagagggggaccttcgggcctcttgccatcggatgtgcccagatgggattagctagtaggtggggtaacggctcacctaggcgacgatccctagctggtctgagaggatgaccagccacactggaactgagacacggtccagactcctacgggaggcagcagtggggaatattgcacaatgggcgcaagcctgatgcagccatgccgcgtgtatgaagaaggccttcgggttgtaaagtactttcagcggggaggaagggagtaaagttaatacctttgctcattgacgttacccgcagaagaagcaccggctaactccgtgccagcagccgcggtaatacggagggtgcaagcgttaatcggaattactgggcgtaaagcgcacgcaggcggtttgttaagtcagatgtgaaatccccgggctcaacctgggaactgcatctgatactggcaagcttgagtctcgtagaggggggtagaattccaggtgtagcggtgaaatgcgtagagatctggaggaataccggtggcgaaggcggccccctggacgaagactgacgctcaggtgcgaaagcgtggggagcaaacaggattagataccctggtagtccacgccgtaaacgatgtcgacttggaggttgtgcccttgaggcgtggcttccggagctaacgcgttaagtcgaccgcctggggagtacggccgcaaggttaaaactcaaatgaattgacgggggcccgcacaagcggtggagcatgtggtttaattcgatgcaacgcgaagaaccttacctggtcttgacatccacagaactttccagagatggattggtgccttcgggaactgtgagacaggtgctgcatggctgtcgtcagctcgtgttgtgaaatgttgggttaagtcccgcaacgagcgcaacccttatcttttgttgccagcggtccggccgggaactcaaaggagactgccagtgataaactggaggaaggtggggatgacgtcaagtcatcatggcccttacgaccagggctacacacgtgctacaatggcgcatacaaagagaagcgacctcgcgagagcaagcggacctcataaagtgcgtcgtagtccggattggagtctgcaactcgactccatgaagtcggaatcgctagtaatcgtggatcagaatgccacggtgaatacgttcccgggccttgtacacaccgcccgtcacaccatgggagtgggttgcaaaagaagtaggtagcttaaccttcgggagggcgcttaccactttgtgattcatgactggggtgaagtcgtaacaaggtaaccgtaggggaacctgcggttggatcacctccttaccttaaagaagcgtactttgcagtgctcacacagattgtctgatgaaaatgagcagtaaaacctctacaggcttgtagctcaggtggttagagcgcacccctgataagggtgaggtcggtggttcaagtccactcaggcctaccaaatttgcacggcaaatttgaagaggttttaactacatgttatggggctatagctcagctgggagagcgcctgctttgcacgcaggaggtctgcggttcgatcccgcatagctccaccatctctgtagtggttaaataaaaaatacttcagagtgtacctgcaaaggttcactgcgaagttttgctctttaaaaatctggatcaagctgaaaattgaaacactgaacaatgaaagttgttcgtgagtctctcaaattttcgcaacacgatgatggatcgcaagaaacatcttcgggttgtgaggttaagcgactaagcgtacacggtggatgccctggcagtcagaggcgatgaaggacgtgctaatctgcgataagcgtcggtaaggtgatatgaaccgttataaccggcgatttccgaatggggaaacccagtgtgtttcgacacactatcattaactgaatccataggttaatgaggcgaaccgggggaactgaaacatctaagtaccccgaggaaaagaaatcaaccgagattcccccagtagcggcgagcgaacggggaggagcccagagcctgaatcagtgtgtgtgttagtggaagcgtctggaaaggcgcgcgatacagggtgacagccccgtacacaaaaatgcacatgctgtgagctcgatgagtagggcgggacacgtggtatcctgtctgaatatggggggggaccatcctccaaggctaaatactcctgactgaccgatagtgaaccagtaccgtgagggaaaggcgaaaagaaccccggcgaggggagtgaaaaagaacctgaaaccgtgtacgtacaagcagtgggagcatgcttaggcgtgtgactgcgtaccttttgtataatgggtcagcgacttatattctgtagcaaggttaaccgaataggggagccgaagggaaaccgagtcttaactgggcgttaagttgcagggtatagacccgaaacccggtgatctagccatgggcaggttgaaggttgggtaacactaactggaggaccgaaccgactaatgttgaaaaattagcggatgacttgtggctgggggtgaaaggccaatcaaaccgggagatagctggttctccccgaaagctatttaggtagcgcctcgtgaactcatctccgggggtagagcactgtttcggcaagggggtcatcccgacttaccaacccgatgcaaactgcgaataccggagaatgttatcacgggagacacacggcgggtgctaacgtccgtcgtgaagagggaaacaacccagaccgccagctaaggtcccaaagtcatggttaagtgggaaacgatgtgggaaggcccagacagccaggatgttggcttagaagcagccatcatttaaagaaagcgtaatagctcactggtcgagtcggcctgcgcggaagatgtaacggggctaaaccatgcaccgaagctgcggcagcgacgcttatgcgttgttgggtaggggagcgttctgtaagcctgtgaaggtgtactgtgaggtatgctggaggtatcagaagtgcgaatgctgacataagtaacgataaagcgggtgaaaagcccgctcgccggaagaccaagggttcctgtccaacgttaatcggggcagggtgagtcgacccctaaggcgaggccgaaaggcgtagtcgatgggaaacaggttaatattcctgtacttggtgttactgcgaaggggggacggagaaggctatgttggccgggcgacggttgtcccggtttaagcgtgtaggctggttttccaggcaaatccggaaaatcaaggctgaggcgtgatgacgaggcactacggtgctgaagcaacaaatgccctgcttccaggaaaagcctctaagcatcaggtaacatcaaatcgtaccccaaaccgacacaggtggtcaggtagagaataccaaggcgcttgagagaactcgggtgaaggaactaggcaaaatggtgccgtaacttcgggagaaggcacgctgatatgtaggtgaagcgacttgctcgtggagctgaaatcagtcgaagataccagctggctgcaactgtttattaaaaacacagcactgtgcaaacacgaaagtggacgtatacggtgtgacgcctgcccggtgccggaaggttaattgatggggttagcgcaagcgaagctcttgatcgaagccccggtaaacggcggccgtaactataacggtcctaaggtagcgaaattccttgtcgggtaagttccgacctgcacgaatggcgtaatgatggccaggctgtctccacccgagactcagtgaaattgaactcgctgtgaagatgcagtgtacccgcggcaagacggaaagaccccgtgaacctttactatagcttgacactgaacattgagccttgatgtgtaggataggtgggaggctttgaagtgtggacgccagtctgcatggagccgaccttgaaataccaccctttaatgtttgatgttctaacgttgacccgtaatccgggttgcggacagtgtctggtgggtagtttgactggggcggtctcctcctaaagagtaacggaggagcacgaaggttggctaatcctggtcggacatcaggaggttagtgcaatggcataagccagcttgactgcgagcgtgacggcgcgagcaggtgcgaaagcaggtcatagtgatccggtggttctgaatggaagggccatcgctcaacggataaaaggtactccggggataacaggctgataccgcccaagagttcatatcgacggcggtgtttggcacctcgatgtcggctcatcacatcctggggctgaagtaggtcccaagggtatggctgttcgccatttaaagtggtacgcgagctgggtttagaacgtcgtgagacagttcggtccctatctgccgtgggcgctggagaactgaggggggctgctcctagtacgagaggaccggagtggacgcatcactggtgttcgggttgtcatgccaatggcactgcccggtagctaaatgcggaagagataagtgctgaaagcatctaagcacgaaacttgccccgagatgagttctccctgactccttgagagtcctgaaggaacgttgaagacgacgacgttgataggccgggtgtgtaagcgcagcgatgcgttgagctaaccggtactaatgaaccgtgaggcttaaccttacaacgccgaagctgttttggcggattgagagaagattttcagcctgatacagattaaatcagaacgcagaagcggtctgataaaacagaatttgcctggcggccgtagcgcggtggtcccacctgaccccatgccgaactcagaagtgaaacgccgtagcgccgatggtagtgtggggtctccccatgcgagagtagggaactgccaggcatcaaattaagcagtaagccggtcataaaaccggtggttgtaaaagaattcggtggagcggtagttcagtcggttagaatacctgcctgtcacgcagggggtcgcgggttcgagtcccgtccgttccgccacttattaagaagcctcgagttaacgctcgaggttttttttcgtctgtatatctattattgccagaatcgcaaaaatcctctgcattttacgctctttttcctcaacagtctgaagcccataatcacctcagttaacgaaaatagcattaaaagaggcatattatggctatccctgcatttggtttaggtactttccgtctgaaagacgacgttgttattagttctgtgataacggcgcttgaacttggttatcgcgcaattgataccgcacaaatctatgataacgaagccgcagtaggtcaggcgattgcagaaagtggcgtgccacgtcatgaactctacatcaccactaaaatctggattgaaaatctcagcaaagacaaattgatcccaagtctgaaagagagcctgcaaaaattgcgtaccgattatgttgatctgacgctaatccactggccgagtccagacgatgaagtctctgttgaagagtttatgcaggcgctgctggaagccaaaaaacaagggctgacgcgtgagatcggtatttccaacttcacgatcccgttgatggaaaaagcgattgctgctgttggtgctgaaaacatcgctactaaccagattgaactctctccttatctgcaaaaccgtaaagtggttgcctgggctaaacagcacggcatccatattacttcctatatgacgctggcgtatggtaaggccctgaaagatgaggttattgctcgtatcgcagctaaacacaatgcgactccggcacaagtgattctggcgtgggctatgggggaaggttacagtgtaattccttcttctactaaacgtaaaaacctggaaagtaatcttaaggcacaaaatttacagcttgatgccgaagataaaaaagcgatcgccgcactggattgcaacgaccgcctggttagcccggaaggtctggctcctgaatgggattaagcctctctgacagctcctccgggagctgtttttacatgctcgctaaggaaatcgataaaagcccggatgcgcgtacttaccgcacggtcgctgtaatagacggcactgaatggcatttccactggcaacactttatctgccattaactccaccaattctccgcgagcgatttctttgtcgatcatgtagtcggacaaacacgcaatcccgttgccactcaggcaaagctgtttcagtgtttccccactattggaactcaaaccgtacttcacctcatgtaattgtccatcgctacgggctatcggccaggtattgagggaagcgggttcagtgaatcccaggcaaatatgttgctttaaatcgtcgatcgtttctggcttcccgtagcgggaaatataatcgggggaggcgataatttttcgataactgttaaataacggcctggcacgtaagctggaatccgttaacgtaccagcgcgtatcgcgacatccacttttctttcgatcaaattaataatcgtttcggaggagactaggctcaaagtgacttccggatagcgttcacggaaaggcttaattaacggcatcagaaagtgcagcaccactggagttgcggcatcgatccgtaacagtccacgcggtgtattacgcgtctccataatttcactttctgccgctgccatctcctgcaaaatactctgtacgcgacgaaaataacgctcgccttcttccgtcaggctaagttgtcgcgtggtccgattaagcaggctaacgccaagtttcatctccagctttttcaccgcccggcttaccgcactgtttgcttgccctaattgttccgctgcccggctaaagctgccgctttcgacgacgctaacaaaaatggcgagttcttcgctcgtggctttcatttttgctcctgttgcaaaatagaagagatattttgaatttatttgtcattaaaccatcaggatgcgtgatatgtcatgcgatttaatgttctccataatgagcaaaattctgaccggtgtaagcacttgcttacataacaatatacaattgctcgttgaaagagtgagctaaaatccctataacagtagaaccctcccgagtgcggaagggttgacgtaatagaggtttcaaagtcaaaagtgcgaaaaaacacctatgccatgcgctatgttgccggacaacctgcggaaaggatcttaccgccggggtcttttgcgagcatcggccaggcattaccacctggggaaccgttaagtaccgaagagcgtattcggatcctggtgtggaacatatacaaacagcaacgcgctgaatggttgagcgtattaaagaactacggcaaagatgcacatctggtgttattgcaggaagcgcagacaacgccagagttagtacagtttgcgaccgctaactatcttgccgccgatcaggtacccgctttcgtgctgccacaacatccttctggcgtaatgacccttagcgcggcacatccagtgtattgctgcccgttacgtgaacgagaacccattttgcgtctggcgaagagcgcactggtgacggtctatccattacctgacacccgcctgttgatggtggttaatatacacgccgtcaacttcagtctgggcgtggatgtctatagtaagcagttacttcctattggcgatcagatagctcaccacagcggcccggtcattatggcgggagatttcaatgcctggagccgtagaaggatgaacgcgttatatcgctttgcgcgggaaatgagcctgcgccaggtgcgttttaccgatgatcagcgccgtcgggcgtttggtcgcccgctcgattttgttttctaccgtggtctgaacgtcagtgaagcttctgtactggttacgcgcgcttccgatcacaatccgctactcgttgaattcagtcccggcaagcctgataaataaggtatgagtggtctgccacagggcagaccaacgtttggcgctgcgcaaaacgtgagcgcggtggtggcgtatgacttatctgcccacatgctggatgtcgtggcacaagctgccgaagcccggcaactgaaaaatatcaccacccgccagggatatgccgaaagtctgccatttgccgataacgcatttgatattgttatcagccgttattctgcccatcactggcatgatgttggtgcagcactgcgagaagtgaataggatattgaaacctggcggtaggctgattgtgatggacgtaatgtctccgggtcacccagtgcgcgacatctggttacagacggtagaagcattacgcgatacctctcacgtacgaaactacgccagcggtgagtggttgacgttaatcaatgaagccaatctgatagttgataatttaattacagataagttaccgctggaattttctagttgggtcgcgagaatgcgtacgccagaagcgttagtagacgctattcgcatttaccaacagagcgcaagcacagaggtgagaacgtattttgccttgcagaatgatggctttttcaccagtgatatcatcatggtagatgcacataaagcggcataaataaaaaaggcaccgggggaatcggtgcctttttattatctggtttgtcaggaatctggcatgttgttgtttttcacaaacaacgtcagcttatcgcctggttgcagattcgcagtgtcgctgttccagcgcatcacatctttgatgttcacgccgtggcgtttagcaatgctactaaggctatcgcctttgcgcacacgatacgtaatgctatcgctgttgtttgccagtcgctgtgcgctactgcctgcaccaatcgtcaaactttggcctggcttcagcttagatccgcgcagtttgttccactgctgcaaatctttggtgcttacgccgagacgactagcgatactactaagcgtgtcgccagagcgtacggtgtaaacacggctgttaagcggcgtattgtcggcaaccagcgtgctctgtacagcagcaatttcgccactagccagagattcacgcagttgatctgcatgcttctttggcaccatcacgtactgcgggccacttgcgcccagcgtggagccttttacgccagcgttgaatgtcttcagcttgctgacggaaatccccgccatatctgctaccttcgccatttcaaccgggctgctcaggtgcacacgcgccagagcacggctttcatcggtcgttggcagacgtacgccataacgcttgctgtttttgagaatatcactcaatgccagcattttaggcacgtactgcttcgtttcctgcggcaacggtaagctccagaagtccgtggatttcccacgcgctttgttcgttttaattgccttcatgacccgaccttcgccgctgttataagccgctacggtcagaagccagtcgccgtcaaacattttgttcagacgctgcatcatattcagcgcggcagttgcactagcaacaacatcgcgacgcgcgtcataattgcgggtctgtttcaaaccataattgcgccccgtgctcggaatgatctgccagatgcctgcggcattggcgccagacgttgcgtgaggatcaaaagcgctctccactatgggtagtagtaccagttccataggcatgttacgttttttaacttgccctgctatccagtacatatacggctctgcccgtaaagttacatcgtggagatagctcttattgcgtaaatatttctgtttctgttcgcgaatccggtcattttccggaattcccatctttagctcgtcgccaatgaaagcccacaagtcaccatctggcgcgatagacgtcccatcgtccatccatcgtgcctgacttgtaaactttgctgcttccccttgaccagctgcagaaaggctctgtgcgtgctgttgaacgttgccggtactctggcaacccacgagcaggacagaggcgagtaatatcgcttttgccttcatgtgtgtgtcaatagttgcttaaaagacgaccgatcataacggcgaacggagccgatgacaagaaagttttatcagaacctatctttcttactccttaaccatgcaaaacgctcttcaggttgttgcaataatgtttcttcattaattacattaattaaatcaatatcttccgttcttaaaaaaacattaatttgccgctcatttttcagaattacgggtagtgttatttgattttttgcccgtaactccttaactttacgataataatcatttatggacaaatcgtgcggaagaatactcaaagcaaacttcatattacttaaggtatattcatgagcacaacataccaatgtatcgtcaggtaacgcacttaactttttaagactttgatacatttgacttgctgtcccttcaaacaaccgaccacacccaccagaaaacagtgtgtcgccgcaaaatagataaggtttactgaagtaacagatatgtcctaaagtgtgacccggcgtagcaattacactaaattcatgccccaaaacgaaggcagtttcgccatctttgactacctgtgttgttcccttatcttgtgtctcttgtggaccatacaccacaatttgtggaaacttttccaccagttcttttacgccgccaacgtgatcgtggtgatggtgggtgagaaatatggcctccggttgccagttattggcggcaatggcgtttaatactggctctgcgtctccgggatcgacaatcaggcagcgacctgcttcatcattcaaaacccagatgtaattgtcatcaaaggcgggaatactgttaagattcatagattacctctcagtgtgaaacggaaggttgtgatgaaaccggcaagagtccctcaaactgtcgtggctcctgattgctggggcgatttgccctggggaaagctttatcgcaaggcgctggagcgccagctcaacccgtggttcactaaaatgtatggttttcatctgcttaagattggcaatttaagcgcagaaatcaattgcgaagcgtgcgcggtttctcatcaagtgaatgtttctgcgcaaggaatgcccgtccaggtacaggcggacccacttcatcttccttttgccgataaatccgttgatgtttgtctactggcacatacattgccgtggtgcaccgatccgcatcgtttattgcgtgaagccgatcgggtattgattgatgatggctggctggtcattagtggcttcaatcccatcagttttatgggattacgcaaacttgtgccggtattgcgcaaaaccagcccctataacagccggatgtttactctgatgcggcagctggactggctctctttgttgaattttgaagtgctacacgccagccgtttccacgttctcccgtggaacaaacacggaggaaaactattgaatgcgcatattcctgcgcttggttgcttacaacttattgttgcccggaaacggactattcctttaacgctaaatccgatgaaacagagtaaaaacaagccacgaattcgccaggcggttggagccacccggcaatgtcgtaaaccacaggcttaaacttcaacttggtagcctgtatcttccagtgtgggattcatcgccgcggcacgagccagttcatcacagcgttcgttttccgggtgtccggcatggcctttaacccattcccatttgatttgatgctgccccaatgcagcatcaagacgttgccagagatcgacattttttactggttttttgtctgcggttttccagccacgttttttccagttatggatccactgggtgataccctggcggacatactggctgtcggtactcaaaatgacttcgcaatgttcttttaacgcctccagcgcgacaatagcggccatcaactccatacggttgttggtggtgcgggtgtagccagcgctaaaggttttctcgcgtccgcgatagcgtaaaatagcgccgtaacccccaggtcctggattgcccagacagctaccatcggtgaaaatttctacctgtttaagcatctctggtagacttcctgtaattgaatcgaactgtaaaacgacaagtctgacataaatgaccgctatgagcactgcaattacacgccagatcgttctcgataccgaaaccaccggtatgaaccagattggtgcgcactatgaaggccacaagatcattgagattggtgccgttgaagtggtgaaccgtcgcctgacgggcaataacttccatgtttatctcaaacccgatcggctggtggatccggaagcctttggcgtacatggtattgccgatgaatttttgctcgataagcccacgtttgccgaagtagccgatgagttcatggactatattcgcggcgcggagttggtgatccataacgcagcgttcgatatcggctttatggactacgagtttagcttgcttaagcgcgatattccgaagaccaatactttctgtaaggtcaccgatagccttgcggtggcgaggaaaatgtttcccggtaagcgcaacagcctcgatgcgttatgtgctcgctacgaaatagataacagtaaacgaacgctgcacggggcattactcgatgcccagatccttgcggaagtttatctggcgatgaccggtggtcaaacgagcatggcttttgcgatggaaggagagacacaacagcaacaaggtgaagcaacaattcagcgcattgtacgtcaggcaagtaagttacgcgttgtttttgcgacagatgaagagattgcagctcatgaagcccgtctcgatctggtgcagaagaaaggcggaagttgcctctggcgagcataaatacctgtgaaaggcgctaaaaatagcgacttgggcgatttttgcagcaaacgattcaaaagatgagaaaaaccgttgacgaaggtcgaggcaatccgtaatattcgcctcgttcccaacggaacacaacgcggagcggtagttcagtcggttagaatacctgcctgtcacgcagggggtcgcgggttcgagtcccgtccgttccgccactattcactcatgaaaatgagttcagagagccgcaagatttttaattttgcggtttttttgtatttgaattccaccatttctctgttcaatgattttactctggcgtaggtgcgtgattctcgcttgttgtctcattcattaaaattcaataatgatatcgaaccattcagcttaaatatatttctagagaataaatttatattgattaaatgaatgtatatttcaaattgattttgtttgttattatttaagtgaggtatataattagagtccgttatcaatgctaaatattctaatcattatgacaggcgagggagtgtccaattatgaatagtaaaaagctttgttgcatatgtgtgttattcagcctgcttgcaggatgtgcctctgaatcttctattgatgaaaagaagaaaaaagctcaagtcacacaaagtaatattaataaaaacactccccagcaactgacagacaaagatttattcggtaatgaaaccactctggccgtatccgaagaggatattcaagctgcgcttgatggagatgagttccgcgttccccttaattctcctgtaatacttgttcaatccggcaaccgcgcaccggaaaccattatgcaggaggagatgcgaaaatattatactgtttccacattctctggtatcccggacaggcaaaagcctctgacttgtaacaaaaacaaagataaaaatgagaacgaggatgttgccagtgctgagaatatgaactggatgcaggcactgcgttttgtggctgcaaaaggacatcagaaagcgattattgtttaccaggatatgttgcagacaggaaaatatgactctgcgctgaaaagtacagtatggtccgactataaaaatgacaaactcactgacgctatctccctgcgctacctggtacgtttcacgctggtggatgtggcaacaggtgagtgggctacctggagcccggtgaattatgaatataaagtgcttccaccattgcccgacaagaatgaagccagtacgactgatatgacagagcagcaaatcatgcaacttaagcaaaagacctataaagcgatggtaaaagatttggttaaccgctatcaataataaattatatctgccgccaggaatttctggcggcaataatacaaaattctttgcataagaaatttttcttgacaaagacagtgcaagaaaggacatggaatccggagttaaaaactgtttgttttagaatatttaattatttaactgctgaatcttccttgcgagaaatatatccattattacatttcatgccatttttaatatagattgctcctgggaaaattcccgtattattaccgcaggggtgataattagtattgacatatcctgtgacaaaaggagctattaaaggtgctattacgatagctattagtaaaaatataagagttagctgtattgttatgtctgtggcgaaattgactaccttcgtttttttgattaagaatgattttattatcgtaagtaaaattacatgaatatttaaaaaggaaaacgacatgaaaccgaagcacagaatcaacattctccaatcataaaatatttccgtggagcattttattattgaatatagaggtttaactccggtaaaaaacaaagaagcattgaatgcagggaaaaataatatggccataaaaaacatcgaaagaaactcttttaatttaacatgtaaacgcatggttaatcctcatatcacgggtggagtgttaagaacatacataaatggagtcatgttttcccttttccatttatcaagttcctgttgccgttttagtccatctctaattgcatattttaatttttcacttaaatggcattgagcatcgatttcatttaaaacaactgtacacactatccctgtcagtaaaattgctcctccgacaagaattactggaaagccaaagctaacacaggcaaaagaagccagacttccaatagcggttgcaacaccaccggctataactgctttggccacatccatactaaaatcgccaagaaaattaaccagatctcgctcactactcataataaattctatggttctgctgatttaaccgcagagaagttcgccacagcaatccgaaaccactggcacgtggagaataagctgcacaggcgtctggacgtggtaatgaatgaagacgactacaaaataagaagaggaaacgcagcagaattatttagtgggatacggcacattgctattaatattttgacgaatgagaaggtattcaaggcagggttaagacgtaagatgcgaaaagcagccatggacagaaactacctggcgagtgtccttgcggggagcgggcttagctaataataccccgactctccccgtccttaaacacaacccccactcaccacaacctaaactcatccgcatcctgccatgccggaaacttttctctatattcccgcaatgctgccatgctcagctccgcatcaatgcgcgttgcctgatgcgcgtcggcagtagcgataatctctccttgcggattaatcacccggctgtcaccgcgataatggcagccgttgccatcgctgccgacgcgattgcatcccgccacatacgcctgattctcaatcgcgcgggccgtcagcaatgcctgccagtgcagagagcgcggagcaggccagttggcgacgtacagggcgaggtcataatcgttgagattgcggctccacacaggaaaacgtaagtcgtagcacaccagcggcaaaatacgccagccgcgccattccacaatcactcgcgcattgcccgctttataatgtagatgctcatctgccatgcggaacagatgacgcttatcataaaaatgtaccgtgccgcccggctcaaccagcaaaaagcggttaacgctaccagactccgtttgtaatgcaacactgcctgcaatcagcgcattgcactgctgcgccttagctgtcatccagttcactacgtcatcttgtgctaggctgctagctgccgcttccatggcaaagccgctggtaaacatctccggtagaacgatcacatcgcgcccggtaataccttccagttgacgatcaaaatgacgcaggttggcaggaccatccatccacaccagtggttgctgcaaaagcgtaatcttcaaaccaggcacggtgtacaactcctttatgcgaagggttttataactttaacaccttatcaggcagttgccttagcgcagaataaattgataacaaatgctgatattggaaatatctgatttgcaaattatcgtgttatcgccaggctttaggaggttaataacatgggcaggataagcagcggaggaatgatgtttaaggcaataacgacagtcgccgctctggtcatcgccaccagtgcaatggcgcaggatgatttaaccattagcagccttgcaaagggcgaaaccaccaaagctgcatttaatcagatggtacaagggcataagctgcctgcctgggtgatgaaaggcggtacttatactcccgcacaaaccgtaacgttgggagatgagacgtatcaggtgatgagcgcgtgcaaaccgcatgactgtggcagccaacgtatcgctgtgatgtggtccgagaaatctaatcagatgacggggctgttcagcactattgatgagaaaacgagccaagagaaactcacctggctgaatgtgaacgatgcgcttagcattgatggtaaaacggtgttgttcgcggcgttgaccggcagcctggaaaaccatccggatggctttaattttaaataattagcggataaagaaacggagcctttcggctccgttattcatttacgcggcttcaactttccgcactttctccggcaactttaccggcttcgtcgccagctcttccggatcaaagtcatcaacgttaatactgcgcagacggctttcttcagctttcaccagaatagcggcttcatctttatcaatcagccccttcaccagcgcgttgtgcgccagttcatccagacgggtaaacggcaggtttttacccagctctttacagatccgctgatgaattgggtcggcggcaatcacatccaccagcgcctcttccagcaagccaaccggattatgctcgctcggcgtcaggtactgaccgcgaccaatgcgggaacgggtggcgttcggcacttgtaaaatcttcgccactttatgatccagcttgtcagaaggtgccagataatgacgtccggtcgggaagatcaccacattcagcagcccggcaaccacgcggttcgggaagttttgcagtaaatcatccatcgcctgttcagcctgatacagcgcatcttgtacgccccagtgcaccagcggcaggtcggcttcattacggccttcgtcgtcataacgcttcagcacggcagaggcgaggtagagctggcttaaaatatcccccagacgggcgctgatgcgctcgcgacgtttcaggctgccgcccagcactgccatgctgacatcagaaagcagggcgaggttggcgctcaggcggttcaggtgctgatagtagcgtttagtggcatcgccggttggcgtgctgctggttaaaccgcgcgtcaggcccagccagaagctgcgaactttgttgctaccgacgtgaccgatatgtttgaacaacagtttatcgaacgcgttgacgtcattgttcttcgccgcttccatctcttccagcacgtacggatggcaacgaatcgctccttgtccgaagatcatcatgctgcgggtcagaatgttagccccttcaacggtgatggcaatcggtgcgccctggtaagcacgcgccaggaagttgctttgcccgagcataatgcctttaccgccggtaatatccatcgcatcaataatgttctgctgcccgcggtgggtacagtgatacttaacgatagcgctcagcacggcaggtttttcgccgagcataatgccgtaggtaatcaggcttgccgcagcatccatcacgtaggcattaccggcaatacgcgccagcggctcttcaatcccttccatcttaccaatagagattttgaactgacggcgaatgtgagcatacgcgccggttgccagcgctacgcttttcacgccgccggtactgttggaaggcagggtgatgccgcggcctacgctgaggcactccaccagcatccgccagccttgcccggccattttcggcccgccgatgatgtaatcgatcggcacgaagacatctttaccgcgcgtcggtccgttctggaacggtacgttcagcgggaagtggcgacgaccaatttccacgcccggcgtggtggttgggatcagcgcacaggtaatgcctaaatcttctgcaccgccgagtaatttttccgggtcggagagtttaaacgccagcccaagcacggtcgcaatcggtgccagcgtaatgtagcgtttgttccaggtcagacgcatccccagcacctgctggccctgccattcgcccatgcagacaatcccggtgtccggaatcgcgcccgcatcggaacccgcttccgggctggtcagtgcaaagcaggggatctcctgaccacgcgccagacgcggcagatagtgatctttctgctcgtcagtgccgtaatgttgcaacagttcgcccgggcctaaactgtttggcacgccgacggtaatcgccaggatcccgctcacgccggagagtttttgcagcacgcgagactgggcataagcgctgaactccagcccgccgtactcttttttgatgatcatcgcgaagaaacgatgctctttaaggtacgcccacaactccggcggcagatccgccagctcatgggtgatctggaaatcattcgccatccggcaggcttcttctaccgggccgtcgagaaacgcttgctcttcggcggtcaggcgcggctgcggatagttatgcagctttttccagtccggcttgccctggaacaagtcgccctcccaccaggtggtgcccgcatcaatcgcttctttctcagtgcggctcatcggcggcatcaccttacggaaaccgcgaaataccggcgcggaaatcatgctcttacgcataggcgcaaagttaaatggcacgaggataatggccagaggcaccagtacccacgcgctccacagaccagcaacgccgagggcggctgtccaggcgagcaaaatcagactgctgataaataagctcacgcggtgatagaacaacgcgccgagcaggacaaccgtagcgagaatactcaaaatcatcataacgaaaagccccttacttgtaggaggtctgaccacttgtgatgatatggttgtagtggatgtaaaaacatttagcaatatgtttacaatataattacaacaaagctcacattgttgctgtttttatccgcacttcaggtcaaaaagtcctggtcatagcacctgcccgtacttctcgcttttggcggtatccggtacactgcattttgtctattacatttatgctgaaggatatcctcatgtaccaggatcttattcgtaacgaactgaacgaagcggcggaaacgctggctaactttttaaaagatgacgccaatattcacgccattcagcgcgcggcggtcctgttagcagacagctttaaagccggtggcaaagtgctttcctgcggcaacggcggttcccattgcgacgctatgcactttgccgaagagttgaccggtcgctaccgtgaaaaccgtccgggctacccggcgattgctatttctgacgttagtcatatttcctgcgtcggtaatgatttcggtttcaatgatattttctcccgctacgttgaagcggtaggtcgcgaaggcgatgtactgctggggatctccacctccggtaactctgcaaacgtgatcaaagcgatcgcagcggcgcgtgagaagggaatgaaagtgatcaccctgaccggtaaagacggcggcaaaatggctggcacggcggatatcgaaattcgcgtaccgcactttggttatgccgaccgcattcaggagattcacattaaagtgatccatatcctgatccagttgattgaaaaagagatggttaagtaagtctggcgtaggccggataagacgtttacgccgcatccggcatttgtgcgctgatgcctgatgcgacgctgacgcgtcttatcatgcctacaaatctgtacgcgaaccgtaggccgaataatgcgttcacgccgcatccgacctgaaaattcttaaatcaatcttcgccgggggccatgcgctcccgctgttgtggaggttacccatgtgcgaattgctcgggatgagcgccaacgtccctaccgatatctgctttagtttcaccgggcttgtacagcgtggtggtggaaccgggccacataaagatggctggggcattaccttttacgaaggtaaaggctgtcgcacatttaaagatccacaacccagctttaattcccccatcgccaaacttgtccaggactacccgataaaatcctgtagcgtggtggctcatattcgccaggctaatcggggcgaggtggcgctggaaaatactcacccatttacccgcgagttatgggggcgtaactggacttatgcccataacggacaactgacgggctacaaaagtctggaaaccggcaacttccgcccggtaggcgaaaccgacagcgaaaaagccttctgctggctcctgcataaattaacgcagcgttacccgcgcacaccgggcaacatggcggcggtatttaaatatatcgccagtctggcggatgaactgcggcagaagggcgttttcaacatgctgcttagcgacgggcgctatgtaatggcgtattgcagcactaatttacactggatcacccgccgcgcgccgtttggcgtggcaacgttgctggatcaggatgtggaaatcgacttcagcagccagaccacaccgaatgatgtggtcacggtgattgcaacacagccgctgacgggcaatgaaacctggcaaaagattatgccaggcgaatggcgcttattttgcctcggggagcgtgtagtttgattattttgcctcggggagcgtgtagttacttgccagttgtggctgcacaacttcgtggcttaacggcttgctgaccacgtaacgaccattgaccacagaaacggttggtggcttacgggtttgctcaaagtagtcgtaacccggcttcagttgctcccagaagtccttaaagttggaatatttatggcgcttcatattggcgtcggtcatgcggaacgggtaaatactcacttgcacgctcggctgaccaaacaccagcgcaccagtaacgaactggaatatctcatcaataccctgattggtcattgcgtagcagccgatggaaacacaatcgccgtggatcatcaggtatttcccttcataaccatgcgcacggtcataggcattggggaaaccaatattaatcgctttgtagtaacggctgtctggttttaactgattacgctggacgctataaaacccttccgggcttttgaaatcgccctgacgctgttttggccctaagccgccggaatatttacagattttatagctgtcgagcagttgatattgctcgcccattttgacgtagagatcgagcgtacgttcttccttgaagatctggatgtagacaggggatcccatcaactgctgcttatactctttgctcacaggcgtggtagagctactgctgcccagcaaaccggcaaaactaacgcacgggatcaacaacatcgcaagaattaatgcgattttacgcatactgcttattccttgataaaacggttacacacgccaggacggcaaaatggatcccaaatcggaatagtctggatttggaaggctcacattatcaccaaaagagttttacgcaagcctgtcggcgcagggtttacaaatttcatcggaagcgggctttacccaaagagcgccgcgtgagttccagttctctcaaatcgtaaaagtttatcggtaagtttgtaaatcaggatccagtccggttcgacatgagcatcgcgataacctttccaactaccttgcagcgggtggtctttataaacagctggaagcggtaaagtattattgataagaagcgtcataagatatttcaatttattcatatccttatgacgcttttgtgcaagttttacatccttactatattgtccgctgtattcaatatccctttgaatcatatttaaattcctaatttatcaaataaatcatcggcgtctttggccttatgaacatcaatgccagcttcgctgtttttgatactttgaatggttaattgattaggctcgcgtaaatcaaacggcaatgccttttcacgcgcgacctttgtgagggttatgcgaaccaggtcagagatggtcagccccatcccggccagtacgtccgctgcctgattcttcagatcttcatcgattcgggcgcgaacaaacgcgttagcagccattggggtatctcctgtgctgtatatttattcagcttgaattgtagctcaaatgagcaacagcgacaatccatgagtaatttaataaacggatgtttttacataattaactgaaatatatatgttaattttataataatggtttattaagtttgttcagaaacgatccgggatacactgcaacattaaagcatgaccagccattattgagtatgtccttgccgagcattccatcctttgtattgagcggattactgttgatttgtttgccgttttctagttttgccagcgccaccacaagtcatatctctttcagctacgccgcccgccagcggatgcaaaaccgtgcgcgtttattaaaacagtaccaaactcatctgaaaaagcaggccagctatattgtggaaggcaatgccgaaagcaaaagggcgctacgccagcacaaccgggagcagataaaacagcatccagaatggtttcctgctccgctcaaggcgagtgacagacgctggcaggcgctggcggaaaacaaccactttttaagcagcgaccatctgcataacattaccgaagtggcgattcaccgcctggagcagcagcttggcaagccttacgtctggggcggtacgcggcctgataaaggctttgactgtagcgggttggttttttatgcctacaacaagatccttgaggctaagctcccgcgcacggccaatgagatgtaccactatcgccgggcaacgattgtggcgaacaacgacctgcgccggggagatttgctgtttttccatatccacagccgcgagatagccgatcatatgggcgtgtatttgggcgatgggcaatttatcgagagcccacgtaccggcgaaaccattcggataagccgattagccgaacctttctggcaggaccattttttgggcgcgcgcaggattttgacggaagagacgattttgtaagacggataaggcgtttacgccgcatccggcagttgtacgcaggtgcctgatgcgacgctggcgcgtcttatcatgcctacgagcccgcgaatatttgcgagccgctttcccgatataaaacaacctcattgccaacctttccttttcttcttaccgttgagaaaaaggagtcgccatgtctgaatatcgtcgttattacatcaaggggggaacatggtttttcacggtgaatttacgaaatcgtcgaagccaacttttgaccacccagtaccagatgctccgtcacgccattattaaagttaagcgagacaggccttttgaaatcaacgcctgggtcgttttgccagagcatatgcactgtatctggacattacctgaaggcgatgatgatttttccagccgctggcgggaaattaaaaagcaatttacccatgcttgtggattgaaaaatatctggcaaccacgtttttgggagcacgccatccgcaataccaaagattataggcatcatgttgattatatttatataaatccagtaaagcatggttgggtaaagcaagtgagtgattggccattcagtacgttccatcgcgatgtcgcgcgagggttatatcccatcgattgggcgggggacgtaacggattttagtgccggggagcgtatcattagttaattgtgcgcagatgcctgatgcgacgctagcgcgtcttatcatgcctacaaacttgtgccggatcggtaggccggataaggcgtttatgccgcatccggcagttatgcgcagatgcctgatgcgacgctggcgcgtcttatcatgcctacaaacttgtgcctgaacggtaggacggataaggcgttcacgccgcatccggcagttgtgcaccaatgctggatacttacatcaacgcccccataatcttcaactccagctcatccggcacttcgttatacgacagcacatgcagccccggcgcaaacaaccttgcataacgcgccagcaaagggcgcagctgcggtggcaccagcagcaccgggtctttccccgccgctttcatctgctctttcacctgtggcatcgtactctggaactggttgagcatattcggatcgaccggcacgctgtcgagcatcactttcccgccctgttgcgcctgattcaccacgttggtcagcagattttccagctcattattcagcgtatacaccgtcagctcctgcttgcgaacgaacggatgggtaatgctgcgccgcaatgccaggcgcacatcggccgccagcagaatatgatctttcgtcaccgtgctactggcgaccagcacggtggcgatggtgacgatatcgcgcagggaaacgccttcggtcagcagcgcccggtacactttcagcaactggctgtaattgagcgccgcgctcaaatcttccgccagacgcggtgccgtcgacgataaacggttatgcaactgcgtaatatcatcatagttaaacaaatcaggaatatagctgcgcacaatcttatttacatgggtagcgatcacgctggcgctgtcgatcacctgataccccatattcagcgccttcgctttctgcgccgcctggatccaggtgaccggcatcccgtacgccgggtcgttcccctgcacgccgtcaatctcgccgtaggtttcgctggagggcagggccatcagtttatccgccggaatatccgcttcatcagcctttatgccgttgatgaaaatggcgtactgactgggcttaaggcggaagttttcccgaatgcggatctccggcagcagcacgccgttgccgtcagaaatcacctgccgcacgccgcgaatccgctgggtgagcgggttaccctgtgctttgtccaccagcgccaccagtttgtaaccgaggcttaaactgataggctcgatcagcggaatggtttcccaactgacctgctgctcgctggtttcggtgatggtgcgggtcagcgtttcgaggcttttctcttccgcctccgccgccagcggctgtttgctcatccgccagccggtaaaaccaagcagggcgctgaacagcaaaaacggcaggtgcggcattcccggtaccaccgccagcacgaacataatcccggtggcggtgtagagcaccgacgggcttgccagcagctggttacgcacgtcatgggcgatatcgccgttgtcgctgacgcgggtgacgataatcgccgccgcggtggagagcagcagggaagggatctgcgccaccaggccgtcgccgatggtcatcagcacatactgctggaaggcagcatcggcgctcaggttgtatttgaagatcccgatacagacgccgccgatcaggttgatcgccagaatcatcatcccggcgatggcgtccccgcgcacaaacttcgatgccccgtccatcgcgccgtagaaatcggcctcgctggcaacatctttacgccgggtttgcgcctgcgcctggttgatcaatccggcgttaagatcggcgtcaatcgccatctgtttgccgggcatcgcgtctaaggtaaagcgggcagaaacctcggaaatacgctcggcccctttggtgacgacaataaagttgattgtcaacagcgtcagtaaatccgagcgtgaaagcattatcgccgcgctgcacgggcagtcgatttttaacggtggtgggctgtcgccgttaaataaaatcagcccgtctcatccgccaaaacctgccaccgtggcggtgccggaagagacggagaaaaaagcgcgtgatgtgaatgagaaaacggcgctgctgaagaagaaatccgccaccgagcttggtgagctggcaaccagtatcaacaccattgcccgtgatgcgcatatggaagcgaatctggagatggagattgttccccagggattacgcgtgctgattaaagacgaccagaaccgcgatatgtttgaacgcggcagcgcgaagattatgccgttctttaaaacgctgctggtggagctcgcgccagtgttcgactcgctcgataataaaattattattaccgggcataccgatgcgatggcctacaaaaacaatatctacaacaactggaacctttcgggtgaccgcgcgctttcggctcgtcgggtgctggaagaggccggaatgccggaagataaagtgatgcaggtaagcgcaatggcggaccagatgctgctggattccaaaaatccgcaaagcgcgggcaaccggcgcattgagattatggtgctgaccaaaagtgcgtccgatacgctgtatcaatactttggtcagcatggggataaagtggtgcagccgctggtgcaaaagctggataagcagcaggtgctttcgcagcgaacgcgttaaatgctgaatctttacgcatttctcaaaccctgaaatcactgtatactttaccagtgttgagaggtgagcaatgcgtaaaatcattcatgtggatatggactgctttttcgccgcagtggagatgcgcgacaatcccgccctgcgcgatatccctattgctattggcggcagccgcgaacgtcgggggggtgatcagcaccgccaattatcccgcgcgtaaatttggcgtacgtagcgctatgccgacagggatggcgctcaaattatgcccacatctcaccttgcttccggggcgctttgacgcctacaaagaagccagtaatcatatccgtgaaatcttcagccgctacaccagccgcattgaaccgttgagtctggatgaggcttatctcgatgtcaccgatagcgtccattgccacggttctgcgaccctcatcgcccaggaaatccgccagacaatcttcaacgagctgcaactgacggcgtctgcgggcgtggcaccagtaaagtttctcgccaaaatcgcctccgacatgaataaacccaacggccagtttgtgattacgccggcagaagttccggcatttttacaaaccttaccgctggcaaaaatccccggcgtcggcaaagtcagtgcggcaaaactggaagcgatggggctgcggacctgcggtgatgtacaaaagtgtgatctggtgatgctgcttaaacgctttggcaaatttggccgcattttgtgggagcgtagtcaggggattgacgaacgcgatgttaacagcgaacggttgcgaaaatccgtcggcgtggaacgcacgatggcggaagatattcatcactggtctgaatgtgaagcgattatcgagcggctgtatccggaacttgaacgccgtctggcaaaggtaaaacctgatttactgattgctcgccagggggtgaaattaaagttcgacgattttcagcaaaccacccaggagcacgtctggccgcggctgaataaagctgatctaatcgccaccgcgcgtaaaacctgggatgaacgccgcggcgggcgcggtgtgcgtctggtggggctgcatgtgacgttgcttgacccgcaaatggaaagacaactggtgctgggattatgatgtatactattatgtatattctggtgtgcattattatgagggtatcactgtatgcatcgaattctcgctgaaaaaagcgtcaatatcactgagttacgtaaaaacccagctaaatactttattgatcaaccggttgcggttctttctaataatcgccccgcaggatatctcttaagtgccagcgcattcgaagcgttaatggacatgcttgctgaacaagaggagaaaaagcccataaaggcgcgcttccgtccaagtgctgcaagattagaggaaattacacgccgcgctgaacaatatcttaatgatatgacggatgatgatttcaatgactttaaggaataaggatgcgggtattcaaaacaaaacttattcgcctgcaacttacagcagaggaacttgatgcgttaacggcggattttatttcctataagcgtgacggtgttttgccagatatatttggtcgcgatgcactctacgacgactcctttacctggccattaatcaaatttgagcgagttgctcatattcatctggcaaatgagaataatccatttccgccacagttgcgccaattcagcagaacgaatgacgaagcgcatttggtatattgtcagggggcgtttgatgagcaagcatggttgctcattgccattctgaaacctgaacctcataaactggctcgagataacaaccaaatgcataaaattgggaaaatggcagaagcgtttcgcatgcgtttttgaatttatattatgaataacatacaaataagaaactatcagcctggcgattttcagcaactatgcgctattttcattagagcggttacgatgaccgccagtcagcattatagtccacaacaaatttccgcctgggcgcagattgacgaatctcgctggaaggagaaactcgcgaaaagtcaagtgtgggttgcgatcattaatgcacaaccggttggttttatttcccgcattgaacattatatcgatatgttatttgttgaccctgaatacacccgccgtggggttgccagcgctttgttaaaacctttgattaagtctgaatccgaacttacggtggacgcaagcataaccgcaaaacccttttttgaacgttatggttttcagacagttaagcagcagcgcgttgaatgccggggagcgtggtttactaatttttatatgcgatataaaccgcaacattaaatccagcttgcaatgaaaataacgcccgcctggtatgtgcgcgttttctgattccacaaactgcaaggaggtaaatcatgacaaatcctttatcaatgactctttgcagacctttccaggattaattctttttttcttgccctggattcgtctgccatttcctgatttttatatttatatactctaaataattcgagttgcaggaaggcgacaagcgagtgaatcgccaggagcttacataagtaagtgactggggtgaacgaacgcagtcgcagtacatgcaacttgaagtatgacgagtataaatggaatggtacatgggcaaatatattcgtcccttatccgatgcggtatttaccatcgcatctgatgacctgtggatcgagagtttagcgatccaacaattacacaccacggcaaatttacccaacatgcagcgcgtagtggggatgccagatttacaccccggacgcggctacccgattggcgcagcgttcttctctgttggtcgtttttacccggcaagacgtcgcggtaacggtgctggaaacagaaacgggccgctactctgacacactgcgtagcgcgctggtttctctcgatggcgataacgcatgggcattaagcgaaagctggtgtggcactattcagtggatttgtccgagtccgtatcggcctcatcatgggcgcaaaaactggtttctgggcattgggcgttttaccgctgatgagcaggaacaaagcgatgcaatccgttatgagacgctgcgtagcagcgggccgggcggtcaacatgtcaataaaaccgacagcgcggtacgcgccacgcatttggcatccggtattagcgtgaaggttcagagtgagcgtagtcagcatgctaacaagcggctggcacgattgctgattgcctggaagctggagcaacagcaacaggaaaatagcgcggcgctgaaaagccagcggcgaatgttccatcaccagattgaacgtggcaacccgcgacggacatttacagggatggcttttatcgaaggataatgaaggatgaaactgccggaaggcgattaaacgccatccggcagcaaatcaaataattacttcgccggaatttctttcagcagttcagtcagcagtgtccagtaatgacctacgctttcgatgtgaacttgctcatccggagagtgtggaccggtgatagttggcccgatagaaaccatgtccatttccggatacggttttttgaacagaccacattccaggcccgcgtggataatctggatgttcggcgtcttgttgaacaggcgctgataggtttcacgtaccagatgcatcaccggagaattagcgtccggctgccagccaggatatgcgcctttcgcttcggttttcgcgccagccagtttacccaggctatccagcatgctcaccacgtagtctttaccgctgtcgatcagactacggatcaggcagtgaatttctacgttattgtcagtcatggtcaccacaccgacgttcagggaggtttcaaccacacctttggctacatcggagttacgaatcacaccgttcggggtggcgttcagcagacgaataaaggtatcgcgagatttcgcaatcagggcagctttatcgttcgctacagagtccagcaacaaggccagatttttctctttttctgccagctcgtttttcaggatctcctgataggtattcaccagagatttcaggacgtcgactttatcagctgcgacagcaatggtcgcaaaggcttcacgcgggatggcgttacgcagtgtgccgccgttgaaatcgataaggcgcagatccagttcttccgcatgacccgccaggaagcgcaccagcagtttgttggcattacccagcccaacgtggatttccccgccggagtgaccgcctttcagaccttttaaggttaacttgaaggtttcaaaaccagctggaaccgcttcacgatctaaatgcaggttggaggtgaagtcgataccccccgcacaacccatgtagatttcaccttcttcttcggagtcggtgttaatcagaatatcagcctgcaaccagttgccctgtaagccgaacgcaccgtccataccggcttcttcggtcatggtcagcagcacttccagcgggccgtgaaccacgttttcgtcagccagaaccgccagcgcagaggccataccaatgccgttatccgcacccagcgtggtgccgcgcgctttaacccattcgccatcaatataaggctggataggatctttcgtgaagtcatgcacggtgtcgttatttttctgcggcaccatatcgaggtgggcctgtaagacgaccggtttacgattttccatacctgcggtagcaggtttacgaatcaggatattacctacctgatcgcgttcgacatggaaacctttctcttttgcccaaccaacaatgtattcagcgagttgctcttcatgataggacgggtgaggaatagaacagattttggcaaaaatatcccacagcggctgtggagataattgagacagttcagacacgttaagtctccttgtcgatcacccgcaaaacagtattgcaggtcacagggttagcagaaaatgttgtcaacacaagacaggcttgcgagatatgtttgagaataccactttatcccgcgtcagggagaggcagtgcgtaaaaagacgcggactcatgtgaaatactggtttttagtgcgccagatctctataatctcgcgcaacctattttcccctcgaacactttttaagccgtagataaacaggctgggacacttcacatgagcgaaaaatacatcgtcacctgggacatgttgcagatccatgcacgtaaactcgcaagccgactgatgccttctgaacaatggaaaggcattattgccgtaagccgtggcggtctggtaccgggtgcgttactggcgcgtgaactgggtattcgtcatgtcgataccgtttgtatttccagctacgatcacgacaaccagcgcgagcttaaagtgctgaaacgcgcagaaggcgatggcgaaggcttcatcgttattgatgacctggtggataccggtggtactgcggttgcgattcgtgaaatgtatccaaaagcgcactttgtcaccatcttcgcaaaaccggctggtcgtccgctggttgatgactatgttgttgatatcccgcaagatacctggattgaacagccgtgggatatgggcgtcgtattcgtcccgccaatctccggtcgctaatcttttcaacgcctggcactgccgggcgttgttctttttaacttcaggcgggttacaatagtttccagtaagtattctggaggctgcatccatgacacaggcaaacctgagcgaaaccctgttcaaaccccgctttaaacatcctgaaaccagcacgctagtccgccgctttaatcacggcgcacaaccgcctgtgcagagcgcccttgatggtaaaaccatccctcactggtatcgcatgattaaccgtctgatgtggatctggcgcggcattgacccacgcgaaatcctcgacgtccaggcacgtattgtgatgagcgatgccgaacgtaccgacgatgatttatacgatacggtgattggctaccgtggcggcaactggatttatgagtgggccacccaggcgatggtgtggcaacaaaaagcctgtgcggaagacgatccgcaactcagtggtcgtcactggctgcatgcggctacgttgtacaacattgccgcctatcctcatctgaaaggagatgacctggccgagcaagcgcaggctttgagtaaccgcgcctatgaagaggccgctcagcgtctaccgggcacgatgcggcagatggagtttaccgtacccggcggtgcgcccatcaccggctttttgcatatgccgaaaggcgatggcccgttcccgacggtattaatgtgtggtggtctggatgcgatgcagacggactattacagcctgtatgaacgttattttgcgccgcgcggcattgcgatgctgactattgatatgccgagcgtgggcttttctagtaaatggaagctcacccaggactccagcctgttgcatcagcacgtcttaaaggcgctgcctaacgtaccgtgggtggatcacactcgcgtcgcggcctttggtttccgtttcggcgctaacgttgccgtgcgtctggcataccttgaaagcccgcgtctgaaagcggttgcctgtcttggtccggtagttcataccctgttgagtgattttaagtgccagcaacaggtgccggaaatgtatcttgacgttctggccagtcgtttggggatgcatgatgcttccgatgaagcgttgcgcgtggagctgaatcgctatagtttaaaagtgcaaggattgctgggacgtcgctgcccaacgccaatgttaagtggctactggaagaacgatccgttcagcccggaagaggacagtcgcttaatcaccagtagttctgctgacggtaaattattagagatcccatttaacccggtgtatcggaattttgacaaaggtcttcaggaaatcaccgactggatcgaaaaacgcttgtgttaaaaatttgctaaattttgccaatctggtaaaacagttgcatcacaacaggagatagcaatgacgttaccgagtggacacccgaagagcagattgatcaaaaaatttaccgcactaggcccgtatattcgtgaaggtaagtgcaaagataatcgattctttttcgattgtctggctgtatgcgtcaacgtgaaaccggcaccggaagtgcgtgaattctggggctggtggatggagctggaagcgcaggaatcccgttttacctacagttaccagtttggtctgttcgataaagcaggcgactggaagagtgttccggtaaaagacactgaagtggttgaacgactggagcacaccctgcgtgagtttcacgagaagctgcgtgaactgctgacgacgctgaatctgaagctggaaccggcggatgattttcgtgacgagccggtgaagttaacggcgtgagtgaaatgtgccggatgcatcacatccggcaatattcattaaaactgatacgtcatgccaaccgcgacaatatcatcattattaatattcaatttgttatcgctatccagttggttgattttataatcaacaaacgcactcatatttttgttgaaataatacgtagcaccgacgtcgatataattgaccagatcttcatcaccgataccttcaatatctttccctttgcttaagacataacccaggcttggacgcagaccaaagtcaaactggtattgagcgaccgcttcaaagttctgtgtcttattggcaaagccgccagttattggcgtcattttgcgtgtttcagaatagaaagttgccagataaatattattggcatcgtatttcagacctgttgcccatgcttctgcacgcttgcctgtgccacggctttgcaggttctgctcgttggtgcgatcactgttggtataggccccactaatggcgaaatcgctgccgccaaagtcatatgtcaaactcgtgccgaagccatcgccgttttgctttttaacgtcgcggttttcgtttttcccttgatattgcagggttaagttcaggccatcgataacgccgaagaagtcggtgttccgatacgtcgccagaccgctggcgcgtttggtcataaagttgtcggtctgcgcgctggaatcgccaccaaattccgggaacatatcggtccaggcttccacgtcatacaacgcccccaggttacgaccataatcgaaagaacccaaatctttatatttcaacccggcaaaagcgagacgcgttttttgctgtgcagtatcactctctgctttattaccggcaaactctgcttcccaacgaccataaccagtcagttgatcgttaatttgtgtttcgcctttgaaaccaaaacggatataactctggtcgccatctttactggcgttatcactcatataatgcatggctttaactttgccatagacatccagtttattaccgtctttattatatatttctgcagcctgtacagatgcagatgccacaatgcccatcaccactaatgccagagtgctctttttcattttcattcctgattttaattaacgcgcgaatattcagcgggagagtcccgttgaaaacaggaaagtttttaacctgagattgttaaagatatattacagattaataatattcttaaaatgtggtaatttattaaatctgtaataaaagcgtaaacaactgccgctaggcttgctgatcccgcgcaacaaaacgccatgctttgctcgcagatggttggcaaccgacgacagtcctgctaaaacgttcgtttgatatcatttttcctaaaattgaatggcagagaatcatgagtgacagccagacgctggtggtaaaactcggcaccagtgtgctaacaggcggaagccgccgtctgaaccgtgcccatatcgttgaacttgttcgccagtgcgcgcagttacatgccgccgggcatcggattgttattgtgacgagcggcgcgatcgccgccggacgtgagcacctgggttacccggaactgccagcgaccatcgccagcaaacaactgctggcggcggtagggcagagtcgactgattcaactgtgggaacagctgtttagcatttatggcattcacgtcgggcaaatgctgctgacccgtgctgatatggaagaccgtgaacgcttcctgaacgcccgcgacaccctgcgagcgttgctcgataacaatatcgttccggtaatcaatgagaacgatgctgtcgctacggcagagattaaggtcggcgataacgataacctttctgcgctggcggcgattcttgcgggtgccgataaactgttgctgctgaccgatcaaaaaggtttgtataccgctgacccgcgcagcaatccgcaggcagaactgattaaagatgtttacggcattgatgacgcactgcgcgcgattgccggtgacagcgttagtggcctcggaactggcggcatgagtaccaaattgcaggccgctgacgtggcttgccgtgcgggtatcgacaccattattgccgcgggcagcaagccgggcgttattggtgatgtgatggaaggcatttccgtcggtacgctgttccatgcccaggcgactccgcttgaaaaccgtaaacgctggattttcggtgcgccgccggcgggtgaaatcacggtagatgaaggggcaactgccgccattctggaacgcggcagctccctgttgccgaaaggcattaaaagcgtgactggcaatttcagccgtggtgaagtcatccgcatttgcaacctcgaaggccgcgatatcgcccacggcgtcagtcgttacaacagcgatgcattacgccgtattgccggacaccacagccaagaaattgatgcaatactgggatatgaatacggcccggttgccgttcaccgtgatgacatgattacccgttaaggagcaggctgatgctggaacaaatgggcattgccgcgaagcaagccagctataaattagcgcaactctccagccgcgaaaaaaatcgcgtgctggaaaaaatcgccgatgaactggaagcacaaagcgaaatcatcctcaacgctaacgcccaggatgttgctgacgcgcgagccaatggccttagcgaagcgatgcttgaccgtctggcactgacgcccgcacggctgaaaggcattgccgacgatgtacgtcaggtgtgcaacctcgccgatccggtggggcaggtaatcgatggcggcgtactggacagcggcctgcgtcttgagcgtcgtcgcgtaccgctgggggttattggcgtgatttatgaagcgcgcccgaacgtgacggttgatgtcgctagcctgtgcctgaaaaccggtaatgcggtgatcctgcgcggtggcaaagaaacgtgtcgcactaacgctgcaacggtggcggtgattcaggacgccctgaaatcctgcggcttaccggcgggtgccgtgcaggcgattgataatcctgaccgtgcgctggtcagtgaaatgctgcgtatggataaatacatcgacatgctgatcccgcgtggtggcgctggtttgcataaactgtgccgtgaacagagcacaatcccggtgatcacaggtggtataggcgtatgccatatttacgttgatgaaagtgtagagatcgctgaagcattaaaagtgatcgtcaacgcgaaaactcagcgtccgagcacatgtaatacggttgaaacgttgctggtgaataaaaacatcgccgatagcttcctgcccgcattaagcaaacaaatggcggaaagcggcgtgacattacacgcagatgcagctgcactggcgcagttgcaggcaggccctgcgaaggtggttgctgttaaagccgaagagtatgacgatgagtttctgagtttagatttgaacgtcaaaatcgtcagcgatcttgacgatgccatcgcccatattcgtgaacacggcacacaacactccgatgcgatcctgacccgcgatatgcgcaacgcccagcgttttgttaatgaagtggatagctccgctgtttacgttaacgcctctacgcgttttaccgacggcggccagtttggtctgggtgcggaagtggcggtaagcacacaaaaactccacgcgcgtggcccaatggggctggaagcactgaccacttacaagtggatcggcattggtgattacaccattcgtgcgtaaataaaaccgggtgatgcaaaagtagccatttgattcacaaggccattgacgcatcgcccggttagttttaaccttgtccaccgtgattcacgttcgtgaacatgtcctttcagggccgatatagctcagttggtagagcagcgcattcgtaatgcgaaggtcgtaggttcgactcctattatcggcaccattaaaatcaaattgttacgtaagatcttatcattctcccaccaaaaaattatcttaatgtaacagctggtgtaagtaaattctatcaacgaagatcaatcttatctactgaccaaaaaggcctgatagggcttcgctcactatacatccttggctgcaggtttagttgtacaccactcctaaatttaatgtgttggcaatgtgttcaataaagctcgaacaaattagctcattatgatcggttaatacttcaacttctggttgcatgattgtttgtccgtaaaaagataacgcgcctgccgggtagtagcaggcgcattacgcaataggtaaacaagggaggaagttcagaaatgtaaatcgggaaggttgtacgcaatgttcatcgtactacgttgttacggctttgccgcaacaagccagttgcctgccgcgctcgcagaatgtctgcagcccggagataaggagattgttcctgccagctaaatcccttcctgtcgatacgaaccagctcgtatttttctaccagaaaattcacggcatcggctagggtgataccggcatcgatagtctgtatcaggaatgttcgggttaaatatcagcaaaaagcccgcatcatgaatactggatatgaagcatgagagttacctcagtgtttatataaggattcggtccccctctctggaacggtaactctcaatctgatcggttcctgcgttagttcacatcacgactcattttttcgctctcaccggcatcccatttgccacaaaatatcccgccgtgctcctcggcagcgcttcctgtccacgaatcatatccgctattttctcgccaatcataattgtcgtggcgttcaaattcccggtgataatctgcggcataatgctcgcatccaccacacgcaggccttctaacccgtgtacgcggccttcgccgtcaaccacggacatctcgtcgtaacccattttgcaggtaccgcacggatggaaggcggtttcggcgtggttacgcacgaactcatcgagctgttcatccgtctggcattcgacaccggggctgatttcgcggccacgatactgatccagcgcgggttgatgcatgatctcgcgggtgatgcgaattgcgtcgcggaactcctgccagtcctgctcgtggctcatgtagttaaacagaatcgccggatgctggtgcgggtcgcgggatttaatccgcacatgcccacggcttgggctgcgcatactgccgacgtggcactggaaaccgtgctctttcactgcattgctgccgttatagttaatcgctactggcaggaaatggtactgaatattcggccacgcaaattcctcacggctgcgaataaatccacctgcttcaaagtggttgctggcaccaacgccagtgccgccaaacagccactccgcaccgattttcggctggttccaccactgcagggcagggtagagggaaaccggttctttgcactcatattgcagatacatctccagatgatcctgaagattttcgccgacgccgggtaattcatgcaccagcggaatatcaaactccgccagcagttcagcgttgccgacgccggagcgttgcaggatctgcggactggcaatcgcgcctgcacataacagcacttctttgttggccgttgcgcgggttgggatggtgctgtcgccttccagccattcgacgcccaccgcgcgtttgccgtcaaaaatgatgtgatcggtcatagcgtgagtacgaatggtcaggttaggacggcttttggcctgatcgagatagccacgcgcggtgctggcgcgacggccctgcggcgtgacggtgcgatccatcggaccaaaaccttcctgctgataaccgttgagatcgtccgtgcgcgggtagcccgcctgcacgcccgcttcaatcatcgcttcaaacagcggattgacgccgggtttggaggtagtgacgctcaccgggccatcaccgccgtgatagtcgttttcacccatatcgcgagtctcggccttgcggtagtagggcaggcagtcgaggtagctccagttctccagaccgggttcttgcgcccagttatcgagatccagcgcattgccacggatgtagcacatgccgttgatcaggctgcttccacccagacctttaccgcgtccgcactccatgcggcggttattcataaacggttcaggttccgtttcataggcccagttgtagcgtttaccctgtagcgggaatgccagggcagcgggcatctgggtgcggaagtcaaagcgatagtccgggccgcccgcttcaagcagcagcacggaggtattcggatcttcagtcagacgggtagcgagaacgttgccggcactgccggcaccaataatgatgtagtcaaattgcaaataaacctcctggttagaatatggactggaatttagccatctcaacctggatggacttcacctgggtgtaactctggagcgtcatcacgccgttctcgcgaccaatgccggagtgtttgtagccgccaacgggcatctctgccggggattcgccccaggtgttgatccagcaaatacccgcttccagctgatgaatgacgcgatgcgcgcggttcaggtccgctgtcacgatgcccgccgccaggccgtagtcggtatcgttagcgcggcgaatgacttcgtcttcgctctcgtaggtcagaatggacatcactggcccgaagatctcttcacgcacgatggtcatatcgtcgctgcaatcggtgaacactgtcggtgcaacccatgcgccgttatcgaagccatcgcctttcagtacatcgccgccgcacagtacgcgcgcgccttcctctttgcctttggcgatatagcgcagcacgttatcgcgatgcgggaagctgaccagcgggccgaagttagtttgcggatcgaaaacgtcgcccgcgcgaatgcgctcaacgcgcgccagaattttctgctcaaatgcggctttgcatttcgccggaacgaagacgcgggtgccattggtacacacctgaccggagctgaagaagtttgccatcatggcgatatcggcggcgagatcgagatccgcatcatcgaaaacgatcagcggacttttaccgcccagttccatggtcacttctttcagggaagaggccgcgctgttagccatcacttttttgccgctggcgacaccgccggtaaaactcactttggcaatgcccggatgctcggtcagatattgcccggtctccgcgcccacgcccggcaacacgttaaatacgccgtccggcaggcccgcttcgctgtaaatttcagccagctttaacgcggtaagcggggtaacttcgctcggtttgaaaatcattgcgttgcctgccgccagcgccggggcggatttccacagggcaatctggatcgggtagttccatgcgccaatccctgccactacgcccagcggttcgcggcgggtatacacaaaggacgtttcacgcaacgggatctggctgccttccagcgccgggatcagcccggcgtagtactccagcacgtccgcaccggtaacgatatcgacggtactggtttcgctatatgcttttccggtgtcgagggtttccagttttgcgagttcgtcattgcgttcacgcagaatatcaacggcccgacgcagaatacggctgcgctccatggcggtcatgctcgcccagattttttgcccctgctgggcgcttttcacggcgcgatcgacatcctcgcgcccggcggcctgcacggtcgccagcacgttaccgttggccgggttaatggtctcgaaggtgcgaccgctggtggcggaggtataaccaccatgtatataaagctgctgttctgccattcgggacatcacgtctcctcggttaatcggtgggtagatgctgagtgataaagtggcgggtcagggaattagcgcgggttttatccagcggtttgccgctcagagccgcgcgcagccataatccatcaatcagcgcggccaggccgtagcccgcttcctgtgcctgttcgcgcggcaattcgcgacgaaactcgctcaccagattgctcagcaagcggcggctgctgacctgctgtaaacgatagagcatcggctgatgcatactgctggcccagaacgccagccaggctttcatcgccgcactgctcacctgcgtttcatcgaagtttccgccaacaatcgcctgtaatcgctgctctgcactgccctgcggaagtgcatgtaatcgattcaaaaccgcgtcacgcagctgactggtgatatcgcgcatggttgcttccagcagaccatttttgtccctgaaatagtggctgatgatccccgtagaaacgcctgcacggcgggcgatctgcgcgatcgttgcatcgtgcatgcccacttcatttattgcttccagtgtggcgtcgatcagttgtctgcgccggatgctctgcatccccaatttgggcattttcgccactccattcatcagcggtgtttatctattaaagcggttattgattggacgttcaatataaaatgtgtcttaattgttacgaatttgattttaaatagtaacaataacagtggggatactggatgacagaccttagtcacagcagggaaaaggacaaaatcaatccggtggtgttttacacctccgccggactgattttgttgttttccctgacaacgatcctgtttcgcgacttcagcgccctgtggattggccgcacgctggactgggtttctaaaaccttcggttggtactatctgctggcggcaacgctctatattgtctttgtggtctgtatcgcttgtagccgttttggtagcgtgaagctcgggccagaacaatccaaaccggaattcagcctgctgagttgggcggcgatgctgtttgctgccgggatcggtatcgacctgatgttcttctccgtagccgaaccggtaacgcagtatatgcagccgccggaaggcgcgggacagacgattgaggccgcgcgtcaggcgatggtctggacgctgtttcactacggcttaaccggctggagcatgtatgcgctgatgggcatggcgctcggatactttagctatcgttataatttgccgctcaccatccgcagcgcgctgtacccgatcttcggtaaacggattaacgggccgataggtcacagtgtggatattgcagcggtgatcggcactatcttcggtattgccactacgctcggtatcggtgtggtgcagcttaactatggcttgagcgtactgtttgatattcccgatagcatggcggcgaaagcggcactgatcgccttgagcgtgataatcgccacgatctctgtcacctccggtgtcgataagggcattcgcgtgttaagcgagcttaatgtcgcgctggcgctgggattgatcctgttcgtattgtttatgggcgacactagcttcctgcttaatgcactggtgctgaatgttggcgactatgtgaatcgctttatgggcatgacgctcaacagttttgccttcgaccgtccggttgagtggatgaataactggacgctcttcttctgggcatggtgggtggcatggagcccgtttgtcggcttgttcctggcgcgtatcagccgtgggcgtaccattcgccagttcgtgctgggcacgttgattattccgtttaccttcacgctgttatggctcagcgtgttcggcaatagcgcgctgtatgaaatcatccacggcggcgcggcatttgccgaggaagcgatggtccatccggagcgcggcttctacagcctgctggcgcagtatccggcgtttacctttagcgcctccgtcgccaccattactggcctgctgttttatgtgaccagcgcggactccggggcgctggtgctggggaatttcaccagccagcttaaagatatcaacagcgacgcccccggctggctgcgcgtcttctggagcgtggcgattggcctgctgacgctcggcatgctgatgactaacgggatatccgcgctgcaaaacaccacggtgattatggggctgccgttcagctttgtgatcttcttcgtgatggcggggttgtataaatctctgaaggtagaagattaccgccgtgaaagtgccaaccgcgataccgcaccgcgaccgctggggcttcaggatcgcctgagctggaaaaaacgtctcagccgcctgatgaattatccgggcacgcgttacactaaacagatgatggagacggtctgttacccggcaatggaagaagtggcgcaggagttgcggttgcgcggcgcgtacgtggagctaaaaagcctgccaccggaagagggacagcagttgggtcatctggatttgttggtgcatatgggcgaagagcaaaactttgtctatcagatttggccgcagcaatatagcgtgccgggctttacctaccgcgcacgcagcggtaaaagcacctactaccggctggaaaccttcctgttagaaggcagccagggcaacgacctgatggactacagcaaagagcaggtgatcaccgatattcttgaccagtacgagcggcaccttaactttattcatctccatcgtgaagcgccgggccatagcgtgatgttcccggacgcgtgattgttattgcataaaaccgcgccatgtctgcatatggcgctgtttctcctacctcttgatacgttatatctatacggttaagcccttagtatctattgatgattaccagacaacagataataaaaaagaaaagaactattgcagcccaaaacctacatttgggctgttgcgaatgttcaataagtttagtcttatttaatgtaaatattgctgatcatttgaaatgacgcattattcatgagaaatgtgtatcgtaaatcaactgaaattaacgcaaccatttgttatttaaggtttaattatctgtgtgtgatattttattgaatgttttaaatattgtttttattggcattgctataatattggttatcatttgctgaatggattcagtcttaatgagtgggtttttaagggacaggcatagagtaatgatacgtatgcataaccaacatctttactcattatgtcattgaatgttgacgctatgtgtttatgagggagaggtattttcagttgatctggattgttaaattcatataatgcgcctttgctcatgaatggatgccagtatgtagtgggaaattataaatattgaaatagtccaactacttctttattaccaaaaatgagtatctgaattttaatattgcattcttgcgtgattatctcctgagtttgacttgtgattacctttttaaggtatttagcgtaactgtttttgagcgagcatcagaggtaaagataatcttcttgatagtgatgtgggatgttatacgtatggcatcgctgatgtttatggttaccccttatgtgtgctcaggaatcgacaggtaatcactcatactgaacagcgataaaagataaaggtgtgttcatgaatagttgtgattttcgtgtttttctgcaagagttcggtacaacggttcatttgagtttgcctggtagcgtatccgagaaagaacgactgctactcaagctgctgatgcagggaatgtctgtaacagaaataagtcagtacagaaatcgcagtgcaaagacaattagtcatcaaaagaaacagctctttgagaaactggggattcagagcgatattactttctggcgcgatattttctttcagtacaatccggagatcatatccgccacggggagtaatagtcacagatatattaatgataatcactatcaccatatcgtcacgcctgaagccatcagtctggcgttggaaaaccacgaattcaaaccgtggatccaaccggttttctgcgcgcagactggcgtactgacgggctgtgaggtgcttgtccgctgggaacatccacaaacgggaattatcccaccggatcagtttattcctctggcggagagttccggtcttattgtcataatgacccgccaactgatgaaacagactgcggatattctgatgccggtaaaacatttgctgccggacaatttccatattggcatcaacgtcagcgcgggttgttttttggcagcgggatttgaaaaagagtgtctgaacctggttaataaattaggtaacgataaaatcaagctggttctcgagctaacggaacgtaaccctattccggtaacgccagaagccagagcgatatttgacagccttcatcagcacaacattacctttgcgctggatgactttggtacgggttatgcgacctatcgttacttgcaggcgttcccggtcgattttattaagatcgataagagttttgtgcaaatggcgagtgtcgacgaaatctccggtcatattgtggacaatattgtcgaactagcgcgtaagcctggtctgagtatcgtggcggaaggggtagaaacccaggagcaggcggatttaatgatcggtaaaggcgttcactttttgcagggctatttgtactctccgccagtaccgggtaataaatttatctctgaatgggtaatgaaagcaggtggttgatgtaaaccgctattcacagcgcatcgggaggttggcagcgattaattctcccgatgcagtaaatcctgatagatccccgttaatatgccatttggcgcaaattgttttttaatccactgcgtcacctgacccgtagcagaatgctgagtcgccagtaacatgcggctatcctggcgcggattatggatttgtcgggtaaccagcagggattgcgtcatcgcctcacggaccatgtaatccggcaaaaaaccaattccttcacctaaaatctggcactgacatttggtgttgaaatctggcaccagaatactctcctgcccgtgcagcaaccagcccacttttttattaatcgtatgcgcggtgtcctccaccataatattagggtagagacgcagttggctttcggcgatgggttccggcacaaaggctaacgggtgatccggggcgatagcaaaagcccagcgaatcgcgccaatttcagtgtaatcaataccgccgccgtccagtagtgtatcgggtgcgccgatggcgatattggcctgattattaataatcgcatcccagacgccgttatacacttcggtggtgacggtaatctggcaggtaggaaactgctttttcagcacctgtaacaagcgtgcggtgtgtttgggcgtataaagcagctgattaatacaaatgcgcacacgcgcttctatgccctggctaatagtatcgattctgcgtttgatggcataaaaatcattcagcaggtcggtagctttgcggaaaaaataacgcccggactccgttaactcaatgctgcgggtactgcgagtgaacagcaccacatccagccccgtctccatacgcttaatggtgtagctaatggcggaagtggttaaacccaactcttctgcggctttactgaagctgccaaaacgcgcagcggtagtaaatgccaacagattctcttcggtaaaaatactgttcattaaaccattctcgccattatctactatgaatttctccagctatgactgtagaggtatcggttaaagatagataatcatttttgaataacttttaatacccgtcgcgtttagtcgtcgcttcgcttaatttttgtccaccatattcactaattacccccacgcagttacccgccagaaaacccagtaacgtcaccgtccagttcatcccgctggcaaaaaacagcgtcatgccgagaaagccaccgggaataaaggacagtaaccagaaacgcccttgccagaccactaccgcgctgaagggtacggtagtaattacgctcgcccagaacgcggacagtccacttacagaggccagccaaccagcagtcagcgcggcgaaaaacgcccacaccatcccggaataattaaccgccagacttctgataaacccgcttttaccgccgcctgcggcataaaaactgcaaaaggcgacgaagccaatggttcctaataattcccatccttgagagagcccgacatgactagacactaactgccaaagccctgcacaaataccgacggtgacacccgttgccgtgagtccgttcatcttgttcccctctggttagacatggacgaaagctactcttacatgtgcagactatagagaaataaaacctgattgagtgaaagggtatcgggtcaaagaaacaaatattgcactaccgcacactgcgaaaagattgttgaatattattcaacaaaaaggcgagatacggcgaattaaatttaagcgggttcttttatcagattatcgttgctattctcaattcatcgaaaacagccacaaaaaccaggggaatgtgaatgagtataaaaaatctacctgccgactatttattggctgcacaacagggtgatatcgataaagtaaaaacctgccttgcgctgggtgtcgatattaatacctgcgatcgtcaggggaaaacggcaattacgctggcaagtttatatcagcaatatgcttgcgttcaggcattaattgatgccggagcggatattaataagcaagattatacctgtttaaatccttttttaattagctgtctgaacgatgatttaacgctactacgaattattttaccggctaaacccgatcttaattgcgtaacccgttttggcggtgtcggcctgacgcctgcctgtgaaaaaggccatttaagtattgtaaaagagcttttggcgcatacggagattaacgttaaccagaccaaccatgtaggctggacgccgctactggaagcgattgtgcttaatgatggtggtattaaacagcaggcgattgtgcagttattgctggaacacggtgccagcccgcatctgaccgataaatatggcaaaacgccactggaactggcgcgggaacggggctttgaagagattgcgcagttactgattgccgcaggtgcataaaccgggaggcttgctatcaacacaccagaaagacggtgtgtgtgggcgctaactgcggatgcggattttctggcgcagcgggggcaaggacaggttgaacaggtctttgccagagcggtaaatatcgcactcccggctcgccagcagttgctgacgctgctttgtgaagagtacgacaatgcgccaaacagttgtcggttggcactcactcactttgatgatctgttccggcatggtgataaggttcagtttgacgatcaaggtattacggttggtcaacatcttcatatagagatgagtcgttgtcggcgttggctgtccccaaccttgcaaatgaccgctgtgaattttcaccttatcgcctggctacagtggcacgacattattcatcagcacctgggggaaaatgaaaccctgtttaattatcgcggcgataatccgttttatcaggcgttaaataaagaattacatattaaacgacgggcagttattcaggccgtaaacgataaacaaaatatcgccagtgcggtcgccagtatgatggggttagggattggccttacgccaagtgccgacgattatttaacaggtctggcgcttattttatttattcccgggcatccggcggaaaaatacaaagaggaattttatctcggtctgcaacgcggcaaaaataataccacattattaagtgccataacgctggaagccgcattacaacaacgctgccgggaaaatattcatcgttttattcacaacattatttatgacatccctgggaacgcaactcaggcaatagaaaaaattaaacatattggctccagttccggctgcgacatgctgtatggcatggccgatggttgtgcgctgagccaaacctacggagggaattatgtcagttaattaaccaaacctacggagggaattatgagtgttaaaatagtcattaaaccgaatacctattttgattctgtcagcctgatgtctatctccacgcgtgcaaataaactcgacggcgtcgagcaggcatttgtggcgatggcgaccgaaatgaataaaggcgtgctgaagaatttaggactgctgacgccggagctggagcaggcgaaaaacggcgacctgatgattgtcatcaatggtaaaagcggtgcggacaacgagcagttactggtggagattgaagaactgttcaacaccaaagcgcaaagcggcagccacgaggcgcgttacgccactattggcagcgccaaaaagcatatcccggaaagtaacctggcggtgattagcgtcaacggtctgtttgccgctcgcgaagcgcgtcaggcgctgcaaaacgatctcaacgtgatgctgttttccgataacgtcagtgttgaagatgaactggcgctcaagcaactggcccacgaaaaagggctgctgatgatggggccagactgtggcacggcgattatcaacggcgcggcgctctgttttggtaacgccgtgcgtcgcggcaacatcggtattgttggcgcatccggcaccggcagtcaggagttgagcgtccgcattcatgaatttggcggcggcgttagccaactgattggcaccggcgggcgcgacctgagcgagaaaatcggcggcctgatgatgctcgacgccatcgggatgctggaaaacgatccgcaaactgaaatcattgcgcttatctccaaaccgcctgcgcctgcggtggcccgcaaagtgctggaacgtgcgcgcgcctgccgcaagccggtggtcgtctgcttcctcgatcgtggcgaaacgccagtggatgagcaggggctacagtttgcccgcggcaccaaagaggcagcgctaaaagcggtgatgctctccggcgtgaaacaggaaaatctcgacctgcatacgcttaaccagccgttgattgcggatgtgcgtgcgcgtctgcaaccgcagcagaaatacattcgtggcctgttctgcggcggcacgctgtgcgacgaaaccatgttcgcggtgatggaaaaacatggcgatgtctacagcaacattcagcccgatccggaattccgcctgaaagatatcaaccgcagcatcaaacacaccttcctcgactttggcgatgacgacttcaccaatggcaagccgcacccgatgattgaccccaccaaccgcatcagtcgcttgatcgaagaggcgcgcgatccagaagtggcggtgatcgtgatggattttgtgctcggatttggaagccatgaagatccggtcggctccaccatcgagacgatcaaagaagcgaaagcgatcgccgctgccgaaggacgcgagttgatcattctcgcctatgtgctgggtaccgatcttgatacgccaagcttagaacaacaaagccagatgctgcttgatgccggagtgattctggcgagcagcagcaccaataccggattgctggcgcgtgaatttatctgcaaaggggaggaagcctgatgagccagagtctgtttagccaaccattgaacgttattaacgtcggcatcgccatgtttagcgatgacctgaaaaagcagcatgtagaagtgactcaactcgactggacgccgccggggcagggcaatatgcaggtggtgcaggcgctggataacattgccgatagcccgctggcggacaaaatcgccgccgctaaccagcaggcgctggagcgtattatccagagccatccggtgctgattggttttgatcaggcgattaacgtggtgccgggcatgacggcgaaaaccattcttcacgccgggccgccgatcacctgggaaaaaatgtgcggcgcgatgaaaggcgcggtcaccggagcgctggtgttcgaaggactggcgaaagatctcgacgaggcggctgaactggcggcttccggggagatcaccttcagcccgtgtcacgagcacgactgcgtgggaagcatggcgggtgttaccagcgccagcatgtttatgcacatcgtaaaaaacaaaacctacggcaacatcgcttataccaacatgagcgagcagatggcgaagattttgcgtatgggcgctaacgaccagagcgtgattgaccgcctgaactggatgcgtgatgtgcagggaccaatactgcgcgacgcgatgaaaattatcggcgaaatcgatctgcgcttaatgctggcgcaggcgctgcatatgggcgatgagtgccataaccgcaataacgccgggacgacactgctgattcaggcgctgacgccggggattattcaggcgggttattccgtcgagcaacagcgcgaagtgtttgagtttgtcgccagcagcgactacttctccggcccgacgtggatggcgatgtgtaaagcggcgatggatgcggcgcatggcatcgaatacagcaccgtggtcaccaccatggcgcgtaacggcgtcgagttcggcctgcgggtcagcggcctgccggggcaatggtttaccggcccggcgcagcaggtgatcggcccgatgtttgccggttataagccggaagatagcgggctggatatcggcgacagcgccatcaccgaaacctacggtattggcggatttgctatggcgaccgcgcccgctatcgtcgcgctggtgggcggcacggtggaagaagctattgatttctcccgtcagatgcgcgaaatcaccctcggtgaaaaccccaacgtcaccattccgctgctcggttttatgggcgtgccgagcgcaatcgacatcacccgcgtgggtagcagcggcattctgccggtgatcaacaccgccatcgcccataaagatgcgggcgtcggcatgattggcgcgggcattgtgcatccaccttttgcctgcttcgagaaagccattcttggctggtgcgaacgttacggcgtctgacctacatgttcatgccggatgcggcgtgaacgccttatccggcctacgaatggcgcaagaatctgtaggcctgataagcgtagcgcatcaggcatttgtcaccattgccggatgcggcgtgaacgccttatccggcctacgaatggcgcaagaatctgtaggcctgataagcgtagcgcatcaggcatttgccaccactgccggatgcggcgtggacgccttatccggcctacgagtggcgcgagaatctgtaggcctgataagcgtagcgcatcaggcatttgtcaccattgccggatgcggcgtgaacgccttatccggcctacgagtggcgcgagaattgtaagcctgataagcgtagcgcatcaggcagtctggcgttggtcataaccccatcaccctctgtagcggacataacaacatgaaagagcttgtggtcgttgccattggtggcaacagcattatcaaagataacgccagccagagcattgagcatcaggcggaggcggtgaaagccgtcgccgatacggtgctggaaatgctggcttccgattacgacattgtgctgacccacggcaacgggccgcaggtcgggctggatttacgccgtgcggagattgcccacaagcgcgaagggctgcccttaacgccgctggcgaactgtgtggcagatacgcagggcggcatcggctatctgatccaacaggcgctgaataaccggctggcgcgtcacggcgagaagaaagccgtcaccgtggtgactcaggtggaagtggataaaaacgatccaggttttgcccatcccaccaagcccatcggcgcattctttagtgacagccagcgtgacgaattacaaaaggcaaaccctgactggtgttttgttgaagatgccgggcggggctatcgccgcgtggtcgccagcccggaaccgaaacgtattgtcgaagcacctgccattaaagcgctgatccaacaaggttttgtcgtaattggcgcgggcggcggtggaattccggtagtgcgtactgacgcgggagattaccaaagcgtggacgcggttatcgacaaagatctctctaccgcgctgctggcccgtgaaattcacgccgacattcttgtgatcaccactggcgtcgaaaaagtgtgtattcactttggcaaaccgcagcagcaggcgctcgatcgggtggatattgccaccatgacccgctatatgcaggaagggcatttcccgcccggcagcatgttgccaaaaatcatcgccagcctgacatttttagaacaaggcggcaaagaagtgattatcaccacgccggaatgcctgcctgcggcgctgcgcggcgaaacgggcactcatattattaaaacgtaaggacgtaagatgaaagaaagcaatagccgccgtgaatttctgagccagagcggtaagatggtcaccgccgccgcgctgtttggtacctctgtgccgctcgcccatgcggcggtagctggcaccctaaactgcgaagcgaacaacaccatgaaaatcactgacccgcattactatctcgataacgtgctgctggaaaccggttttgactacgaaaatggcgtggcggtgcagacccgcacggcgcgccagaccgtggagattcaggacggcaaaattgtcgccctgcgcgagaacaagctgcatccggacgccacgctgccgcactatgacgctggcggtaagctgatgctgcccaccacccgcgacatgcatattcatctcgacaaaaccttttacggcgggccgtggcgcagcctcaatcgtccggcaggcaccaccatccaggacatgatcaaactcgagcagaaaatgctgccggaactgcaaccgtacactcaggagcgggcagaaaaactgattgatttattgcagagcaaaggcaccaccattgcccgcagccactgcaatatcgaaccggtttccggcctgaaaaatctgcaaaatttgcaggcggtgctggcgcgacgtcaggcgggctttgagtgtgaaatcgtcgccttcccgcagcacggtttgctgctgagcaaatctgaacctttaatgcgtgaagcgatgcaggcgggggcgcattacgtcggcggcctggacccgaccagtgttgatggcgcgatggaaaaatccctcgacaccatgttccagattgcgctggactacgacaaaggcgtcgatattcacctgcacgaaaccactccggcaggcgtggcagccatcaattatatggttgaaacggtagagaaaacgccacagctgaagggcaagctgaccatcagtcacgcctttgcgctggcaacgctcaacgagcaacaggtagatgaactggcgaaccggatggtggtgcaacaaatttctatcgccagcacggtgccgattggcacgctgcatatgccgctcaaacagttgcacgacaaaggcgtaaaagtgatgactggcactgacagcgttatcgaccactggagcccttatggtctgggcgacatgctggaaaaagccaatctgtacgcgcagctctatattcgtcctaacgaacagaacctctcccgcagcctgtttttagccactggcgatgtattgccgctgaatgaaaaaggcgagcgtgtatggccaaaagcgcaggatgacgccagctttgtgctggtggacgcctcctgttccgccgaggcggtggcgcgtatcagcccgagaaccgcaacgttccataaagggcaactggtgtgggggagtgtggcaggttgatgcgcatttgaaacgcctgcaacggtgaatagtaagagatttaagccccagggagtggggcaatctgaatatgagtgtgtcggcagaaatggacattatctttgaggaatatgcccttattgacgttgtgtagataactatttgtctacgtgaaaagatcatcagttttgccgattttagtcttttacagatagcaaatatcacacttacaggcgctcgccttatggggaacgttgctgctctgtttcattcaggctcgcggcatgttggggctggatcgggtggtttaaatattggctatattcaatggacgcgttttgccgcgatgacatatcaggcgttgccaaatacacatagctaatcaggagtaaacacaatgaagatcaaagctgttggtgcatattccgctaaacaaccacttgaaccgatggatatcacccggcgtgaaccgggaccgaatgatgtcaaaatcgaaatcgcttactgtggcgtttgccattccgatctccaccaggtccgttccgagtgggcggggacggtttacccctgcgtgccgggtcatgaaattgtggggcgtgtggtagccgttggtgatcaggtagaaaaatatgcgccgggcgatctggtcggtgtcggctgcattgtcgacagttgtaaacattgcgaagagtgtgaagacgggttggaaaactactgtgatcacatgaccggcacctataacagcccgacgccggacgaaccgggccatactctgggcggctacagtcaacagatcgtcgttcatgagcgatatgttctgcgtattcgtcacccgcaagagcagctggcggcggtggctcctttgttgtgtgcagggatcaccacgtatagcccgctacgtcactggcaggccgggccgggtaaaaaagtgggcgtggtcggcatcggcggtctgggacatatggggattaagctggcccacgcgatgggggcacatgtggtggcatttaccacttctgaggcaaaacgcgaagcggcaaaagccctgggggccgatgaagttgttaacagtcgcaatgccgatgagatggcggctcatctgaagagtttcgatttcattttgaatacagtagctgcgccacataatctcgacgattttaccaccttgctgaagcgtgatggcaccatgacgctggttggtgcgcctgcgacaccgcataaaagcccggaagttttcaacctgatcatgaaacgccgtgcgatagccggttctatgattggcggcattccagaaactcaggagatgctcgatttttgcgccgaacatggcatcgtggctgatatagagatgattcgggccgatcaaattaatgaagcctatgagcgaatgctgcgcggtgatgtgaaatatcgttttgttatcgataatcgcacactaacagactgaaaaaattaataaataccctgtggtttaacatattaacttcgctctccacttaactttttagttaaggagagcgaaataatatcaaagtagcagtaaaacctataacgtaaatttaaattgttaaattaacgccctccagtacacaatacttcacacgttagttatgagcgatttctgatagtgcctggtttaatcagagctttattatctgcgacgtttatttttatttaagagagatcgcgatgataagtttaaaagctccgcacaataatttgatgccatatacgcaacaaagcatacttaatacggttaaaaacaatcagttaccagaggatatcaaaagctccctggtttcctgtgtcgatatattcaaggttttgattaaacaatattatgattatccttatgattgtcgtgatgatttagtcgatgacgacaaactcattcatctcatggctgccgtacgagactgtgagtggagtgacgataacgcactcaccataaatgtgcagtttaatgatttccctggattttatgactggatggattaccctgatcacccggttaagtttgtttttcacatacttgaaaatcaaaaagggacagtttgggtatatgaccaggatgatgcgtttcttgatattaaagcaaacgtgcaggctggacgctttaccgggcttaagaaattagtgcagtttatcgatagtgtgcgaacagattgcaaatgtattcttcttgaataccatatgcctttgctgagaattttccctaaagggaaagagtgtatgcatgtggaaaaatggcttcgcgaaatgagctctattccggagacagacgcgcccattaagcaggcgcttgcgcatggattattattacacttaaaaaatatctaccctgtttttcctgaaagtctggtgatgttattgctctctgttctggacgtaaaaacatacagagatgatgcgcgattaaatgaatggatatctaatagagtgcaggaattaggtgacagatattatcctgtaaataagcacgttaaaatccgctacactctttaattcagaaagggttccacctgcaagttgttattccacctgagagtgaatcgcaatgcaggtaatcatttcatctgtatatctgtatgccaactggcattccatctcttttttcgccgatattttgttgtgatcggcgacacttcgcttaaaaaagcaccagtagtggtttcgcagccatgcggtgtataaaaaatgatctcatgcagatgttttgtgaatgtgttggttgacattcatatgaaaaaaatcataattccatcatgtttgtgtggggtcttttctgtatcttacgcatcgcactcaagcctgacagaaaatatgctgtaaggctcatatcaaaaaccgccattagctcatcaggaagagcagacgacaaccaggattgttgtatggtacggggttcgaggcctcgatggcggtccaacttttcaaaactcttctgaatcagatccccttattaagttccctgcaaagtggaacattgccattgtttggctatagtggatggggcagaccaatgaaaaaagcccacacaggggagagtgggctgaaatgggaggctaaagacagtagtaaacttatcggaaataaggaccacgcattacgggggctaagtagcccgatggccgtgattcggcaaatcaggttgattacgtaaagagtaaattatctgctcaccgctgcgtcaccccttcgtaaatcaggcgtagcgcgaatacaccaataattgcaccaataacccgactggcaacgcgttgcatacgcccataagcacgacgcacagcgggcaaagaaaacgcctgactaagaaaaactcgccagataatacttgcgagcacaatccccgcccaggccattaaacgtgcccatgttggtgtttctgcatttaatgttacactgaaaatactgataaaaaataaaacggtttgcgggttagagagatcggtaattaatccgcggcgaaaaaagacataccagggggcgctaatcggttgttgtagtgtgctcatttgcggtgtactctggcggcgcatgctgcaccacgcaaaccataagagataagcgccgccgacgattctgataaggctaaaaatctcctcacactgcgtaattagcgttgcaagaccaaacaaacccaacccggaataaaatgcatcgcccagcgccacgcccagcccggtcagcacccctgcgcgtcgaccggaagccaggctggtttgtactaccacaaagagattggctcccggattaaaaaaagtaatcacgaacagtcctacggtcaggtaaacggcatgcaaaggatccatagtgatttcatccataaataagtgaactaactgcatcatatttctaccaaaaataatcgggtgcgagagagatcacaaagtgtcttatttccggttactggcgtttatgccctgactgaactaattattaatcaacccaataatgtgggtgggtgatagtgtgataacaactctggagccgtaatatgaaaataatctctaaaatgttagtcggtgcgttagcgttagccgttaccaatgtctatgccgctgaattgatgaccaaagcggaatttgaaaaagttgaaagccagtatgaaaaaataggtgatattagtaccagcaatgaaatgagcactgcagatgcaaaagaagatttgatcaaaaaagcggatgaaaaaggggctgatgtgttggtactgacctccggtcaaactgacaataagatccacggcacggcaaatatttataagaagaagtaattctgaatcctatgtaaacatctccgatgcgtaagtttatcggtgatcatctattgaaatttatgccggataaagcgttcgcgctgcattcggcagttcagcttttcagccgccgccagaacgtcgtccggctgatgcctaaataattcgccgctgctgttttatcgccattaaatttctccagtgcctgttgtggtgtcagtaagcgtggagcgggagttttcgcgctctcgcgcgccagttccggcagtagcagttgcataaactgcggcgttaaatccggcgtcggttccacacttaaaaacagcgccagtcgttccatcatattgcgcagttcacgaatattgcctggccagtcgtagtgcagcagcacagtttcacttgcctgtaacccctggcgtaatgcagcagaaaatggggcggagagcgccgccagagacactttcaaaaagctttccgccagcggaagaatatccgccacccgctcgcgcagtggtggcaattgcagacgcaaaatactcagccgataaaacagatcacggcgaaaacgtccttgctgcatatcttcttccagattgcagtgagtggcgctaatgacccgtacatctaccggaacaggctgatgcccgccgacgcgggtgacctctttttcttccagcacccgcagcagccgggtctgcaaaggtagcggcatttcgccaatctcatccagaaacagcgtaccgccgtgggcaatttcgaacagcccggcgcgacctccgcgtcggctgccggtaaacgccccttcctcatagccaaacagttctgcttccagcaggctttcggcaatcgccccgcagttgacggcaacaaacggatggctctttttgccctgtcgcgcatcgtggcgggcaaaatattcccgatgaatcgcctgggccgccagctctttgcccgtccccgtttccccctcaatcaacaccgccgcactggagcgggcatacagcaaaatagtctgccgtacttgttccatctgtggactttgaccgagcatatcgcccagcacgtaacgagtacgcagggcgttgcgggtggcatcgtgagtgttatggcgtaagctcatgcgcgtcatatccagcgcatcgctgaacgcctggcgcacggtggcggcggaatagataaaaattccggtcattccggcttcttctgccaaatcggtaatcagccctgcgccgaccaccgcttcggtgccgttagcttttagctcgttaatctgcccgcgtgcgtcttcctcggtaatgtagctacgttggtcgaggcgcaaattaaaggttttttgaaacgccaccagcgctggaatggtttcctgataggtgacaacgccgatagaagaggtgagttttccggcttttgccagtgcctgtaacacatcgtagccgctcggtttaatcaaaataactggcacactcaggcggcttttcaggtacgcgccgttagagccagccgcgatgatggcgtcacagcgttcgtttgccagtttcttgcggatgtaggtcactgctttttcaaagccaagctgaataggggtaatgttcgccaggtgatcaaactcgaggctgatatcgcgaaacagctcgaacaggcgcgttacagataccgtccagataaccggtttgtcgtcattaagccgtggtggatgtgccatagcgcaccgcaaagttaagaaaccgaatattgggtttagtcttgtttcataattgttgcaatgaaacgcggtgaaacattgcctgaaacgttaactgaaacgcatatttgcggattagttcatgactttatctctaacaaattgaaattaaacatttaattttattaaggcaattgtggcacaccccttgctttgtctttatcaacgcaaataacaagttgataacaaaggatgggctatgtctctacactctccaggtaaagcgtttcgcgctgcactgactaaagaaaatccattgcagattgttggcaccatcaacgctaatcatgcgctgttggcgcagcgtgccggatatcaggcaatttatctttctggcggtggcgtggcggcaggtagcctggggctgcccgatctcggtatttctacccttgatgatgtgctgaccgacattcgccgtatcaccgacgtttgtagcctgccgctgctggtggatgcggatatcggttttggttctagcgcctttaacgtggcgcgcaccgtgaaaagcatgattaaagccggtgcggcaggattgcatattgaagatcaggttggtgcgaaacgctgcggtcatcgtccgaataaagcgatcgtcagcaaagaagagatggtggatcggatccgcgcggcggtggatgcgaaaaccgatcctgattttgtgatcatggcgcgcaccgatgctctggcggtagaggggctggatgcggcgatcgagcgtgcgcaggcctatgttgaagcgggtgccgagatgttgttcccggaggcgattaccgaactcgccatgtaccgccagtttgccgatgcggtgcaggtgccgatcctcgccaacatcaccgaatttggtgccacgccgctgtttaccaccgacgaattacgcagcgcccatgtcgcaatggcgctgtacccacttagtgcgttccgcgccatgaaccgcgccgctgaacatgtctacaacgtcctgcgccaggaaggcacgcagaaaagcgtcatcgacaccatgcagacccgcaacgagctgtacgaaagcatcaactactaccagtacgaagagaagctcgacaacctgtttgcccgtagccaggtgaaataaaaaacgcccgttgattgtattcgacagccgatgcctgatgcgtcgctgacgcgacttatcaggcctacgaggtgcactgaactgtaggtcggataagacggatggcgtcgcatccgacaaccgatgcctgatgcgccgctgacgtgacttatcaggcctacggggtgcactgaactgtaggtcggataagacgcatagcgtcgcatccgacaaccgatgcctgatgcgccgctgacgcgacttatcaggcctacggggtgcactgaactgtaggtcggataagacgcatagcgtcgcatccgacaaccgatgcctgatgcgccgctgacgcgacttatcaggcctacggggtgaactgaactgtaggtcggataagacgcatagcgtcgcatccgacaacaatctcgaccctacaaatgataacaatgacgaggacaacatgagcgacacaacgatcctgcaaaacagtacccatgtcattaaaccgaaaaaatctgtggcactttctggcgttccggcgggcaatacggcgctctgcaccgtgggtaaaagtggcaatgacctgcattaccgcggctacgatattcttgatctggcgaaacattgcgaatttgaagaagtggcgcatctgctgatccacggcaaactgccgacccgtgacgaactcgccgcttacaaaacgaaactgaaagccctgcgcggtttaccggctaacgtgcgtaccgtgctggaagccttaccggcggcgagccacccgatggatgttatgcgcaccggtgtttccgcgctcggctgcacgctgccagaaaaagaggggcataccgtctctggcgcgcgggatattgccgacaaactgctggcgagccttagcagcattctcctttattggtatcactacagccacaacggcgaacgcatccaaccggaaaccgatgacgactccatcggcggtcacttcctgcatctgctgcacggcgaaaagccaagccaaagctgggaaaaggcgatgcatatcagcctggtgctgtacgccgaacacgagtttaacgcctccacctttaccagtcgggtgattgcgggcaccggctctgatatgtattccgcgattattggcgcgattggcgcactgcgcgggccaaaacacggcggggcgaatgaagtgagcctggagatccagcaacgctacgaaacgccggacgaagccgaagcagatatccgcaagcgcgtggaaaacaaagaagtggtcattggttttggtcatccggtttacaccatcgctgacccgcgccaccaggtgattaaacgtgtggcgaagcagctcagccaggaaggcggcagcctgaagatgtacaacatcgccgatcgcctggaaacggtgatgtgggagagcaaaaagatgttccccaatctcgactggttctctgctgtttcctacaacatgatgggcgttcccaccgagatgttcacaccactgtttgttatcgcccgcgtcaccggctgggcggcgcacattatcgaacaacgtcaggacaacaaaattatccgtccttccgccaattatgttggaccggaagaccgcccgtttgtcgcgctggataagcgccagtaaacctctacgaataacaataaggaaacgtacccaatgagtgctcaaatcaacaacatccgcccggaatttgatcgtgaaatcgttgatatcgtcgattacgtcatgaactacgaaatcagctctaaagtggcctacgacaccgcacattactgcctgctcgacacgctcggctgcggtctggaagctctcgaatacccggcctgtaaaaaactgctggggccaattgttcccggcaccgtcgtacccaacggcgtgcgcgtccccggaactcagttccagctcgaccccgtccaggcggcatttaacatcggcgcgatgatccgctggctcgatttcaacgatacctggctggcggcggagtggggccatccttccgacaacctcggcggcattctggcaacggcggactggcttagccgcaacgcggtcgccagcggcaaagcgccgttgaccatgaaacaggtgctgaccgcaatgatcaaagcccatgaaattcagggctgcatcgcgctggaaaactcctttaaccgcgtcggcctcgaccacgttctgttagtgaaagtggcttccaccgccgtggtcgccgaaatgctcggcctgacccgcgaggaaattctcaacgccgttagcctggcgtgggtggacggtcagagcctgcgcacctatcgccatgcgccgaacaccggcacgcgtaaatcctgggcggcgggcgatgccacttcccgcgcggtacgtctggcactgatggcgaaaacgggcgaaatgggttacccgagtgccctgactgcgccggtgtggggcttctacgacgtctcctttaaaggtgaaagcttccgcttccagcgcccgtacggttcctacgttatggaaaatgtgctgttcaaaatctccttcccggcggagttccactcccagacggcagttgaagcagcgatgacgctctatgaacagatgcaggcagcaggcaaaacggcggcggatatcgaaaaagtgaccattcgcacccacgaagcctgtattcgcatcatcgacaaaaaagggccgctcaataacccggcagaccgcgatcactgcattcagtacatggtggcgatcccgctgctattcgggcgcttaacggcggcagattacgaggacaacgttgcgcaagataaacgcattgacgccctgcgcgagaagatcaattgctttgaagatccggcatttaccgctgactaccacgacccggaaaaacgcgccatcgccaatgccattacccttgagttcaccgacggcacacgatttgaagaagtggtggtggagtaccccattggtcatgctcgccgccgtcaggatggtattccgaaactggtcgataaattcaaaatcaatctcgcgcgccagttcccgactcgccaacagcagcgcattctggaggtttctctcgacagagctcgcctggaacagatgccggtcaatgagtatctcgacctgtacgtcatttaagtaaacggcggtaaggcgtaagttcaacaggagagcattatgtcttttagcgaattttatcagcgtagcattaacgaaccggagcagttctgggccgagcaggcccggcgtattgactggcagacgccctttacgcaaacgctcgatcacagcaatccgccgtttgcccgttggttttgtgaaggccgaaccaacttgtgccacaacgccatcgaccgctggctggagaaacagccagaggcgctggcgctgattgccgtctctagcgaaacagaagaagagcgcacctttacctttcgtcagctgcatgacgaagtgaacgcggtggccagtatgttgcgtagtttgggtgtgcagcgcggcgatcgggtgctggtgtatatgccgatgattgccgaagcgcatattactctgctggcctgcgcgcgcattggcgctattcacagcgtggtgtttggtggatttgccagctacagcgtggcggcgcgaattgatgacgctaaaccggtgctgattgtcagcgctgatgccggagcgcgcggtggcaaaatcattccctataaaaaattgctcgacgatgcgataagtcaggcgcagcaccagccacgccatgttttgctggtggatcgcgggctggcgaaaatggcgcgcgtcagcgggcgggatgtcgatttcgcgagcttgcgccatcaacacatcggcgcgcgggtaccggtggcgtggctggaatccaacgaaacctcctgcattctctacacttccggcacgaccggcaaacctaaaggcgtgcagcgtgacgtcggcggatatgcggtggcgctggcgaccagcatggacaccatttttggcggcaaagcgggcagcgtgttcttttgcgcaagcgatatcggctgggtggtggggcatagctatatcgtttacgcgccgctgctggcggggatggcgactatcgtttacgaaggattgccgacctggccggactgcggcgtgtggtggacaatcgtcgagaaatatcaggttagccggatgttcagtgcgccgaccgccattcgcgtgctgaaaaaattccctaccgctgaaattcgcaaacacgatctcagcagcctggaagtgctctatctggctggagaaccgctggacgagccgaccgccagttgggtgagcaatacgctggatgtgccggtcatcgacaactactggcagaccgaatccggctggccgattatggcgattgctcgcggtctggacgacaggccgacgcgtctgggaagccccggtgtgccgatgtatggctataacgtgcagttgcttaatgaagtcaccggcgaaccgtgtggcgtcaacgagaaagggatgctggtggtggaagggccgctgccgccggggtgtattcagaccatctggggcgacgacggccgctttgtgaagacttactggagcctgttttcccgcccggtgtacgccacctttgactggggcatccgtgacgctgacggttatcactttattctcgggcgcactgacgatgtaattaacgttgccgggcatcggctggggacgcgcgagattgaagagagtatctccagccatccgggcgttgccgaagtggcggtggttggggtgaaagatgcgctgaaagggcaggtggcggtggcgtttgtcattccgaaagagagcgacagtctggaagatcgtgatgtggcgcacagccaagagaaggcgattatggcgctggtggacagccagattggcaactttggccgcccggcgcacgtctggtttgtcagccaattgccaaaaacgcgatccggaaaaatgctgcgccgcacgatccaggcgatttgcgaaggacgcgatcctggagatctgacgaccattgatgatcctgcgagcttggatcagatccgccaggcgatggaagagtaagttattgtcggatgcgtcgcgcggtgcatccggcactgtgtgccgatgcctgatgcgacgctgacgcgttttatcatgcctacggacctgaaccgtaggtcggataaggcgctcgcgtcgcatccgacaccatgctcagatgcctgatgcgacgctgacgcgtcttatcaggcctacccactgtttttacaccgataatttttcccccacctttttgcactcattcatataaaaaatatatttccccacgaaaacgattgctttttatcttcagatgaatagaatgcggcggattttttgggtttcaaacagcaaaaagggggaatttcgtgagccaagataacaactttagccaggggccagtcccgcagagcgcgcggaaaggggtattggcattgacgttcgtcatgctgggattaaccttcttttccgccagtatgtggaccggcggcactctcggaaccggtcttagctatcatgatttcttcctcgcagttctcatcggtaatcttctcctcggtatttacactagttttctcggttacattggcgcaaaaaccggcctgaccactcatcttcttgctcgcttcagctttggtgttaaaggcagttggctgcctagtctgctactgggcggaactcaggttggctggtttggcgtcggtgtggcgatgtttgccattccggtgggtaaggcaaccgggctggatattaatttgctgattgccgtttccggtttactgatgaccgtcaccgtcttttttggcattagcgcgctgacggttcttagcgtgattgcggttccggctatcgcctgcctgggcggttattccgtgtggctggctgttaacggcatgggcggcctggacgcattaaaagcggtcgttcccgcacaaccgttagatttcaatgtcgcgctggcgctggttgtggggagttttatcagtgcgggtacgctcaccgctgactttgtccggtttggtcgcaatgccaaactggcggtgctggtggcgatggtggcctttttcctcggcaacagcttgatgtttattttcggtgcagcgggcgctgcggcactgggcatggcggatatctctgatgtgatgattgctcagggcctgctgctgcctgcgattgtggtgctggggctgaatatctggaccaccaacgataacgcactctatgcgagcggtttaggtttcgccaacattaccgggatgagcagcaaaacccttagcgtaatcaacggtattatcggtacggtctgcgcattatggctgtataacaattttgtcggctggttgaccttccttagcgcagctattcctccagtgggtggcgtgatcatcgccgactatctgatgaaccgtcgccgctatgagcactttgcgaccacgcgtatgatgagtgtcaattgggtggcgattctggcggtcgccttggggattgctgcaggccactggttaccgggaattgttccggtcaacgcggtattaggtggcgcgctgagctatctgatccttaacccgattttgaatcgtaaaacgacagcagcaatgacgcatgtggaggctaacagtgtcgaataactaagacgcatgtggaggctaacagtgagcaataacgctttacaaacaattattaacgcccggttaccaggcgaagaggggctgtggcagattcatctgcaggacggaaaaatcagcgccattgatgcgcaatccggcgtgatgcccataactgaaaacagcctggatgccgaacaaggtttagttataccgccgtttgtggagccacatattcacctggacaccacgcaaaccgccggacaaccgaactggaatcagtccggcacgctgtttgaaggcattgaacgctgggccgagcgcaaagcgttattaacccatgacgatgtgaaacaacgcgcatggcaaacgctgaaatggcagattgccaacggcattcagcatgtgcgtacccatgtcgatgttagcgatgcaacgctaactgcgctgaaagcaatgctggaagtgaagcaggaagtcgcgccgtggattgatctgcaaatcgtcgccttccctcaggaagggattttgagctatcccaacggtgaagcgttgctggaagaggcgttacgcttaggggcagatgtagtgggggcgattccgcattttgaatttacccgtgaatacggcgtggagagcctgcataaaaccttcgccctggcgcaaaaatacgaccgtctcatcgacgttcactgtgatgagatcgatgacgagcagagccgctttgtcgaaaccgttgctgccctggcgcaccatgaaggcatgggcgcgcgagtcaccgccagccacaccacggcaatgcactcctataacggggcgtataccagtcgcctgttccgcttgctgaaaatgtccggtattaactttgtcgccaacccgctggtcaatattcatctgcaaggacgtttcgatacgtatccaaaacgtcgcggcatcacgcgcgttaaagagatgctggagtccggcattaacgtctgctttggtcacgatgatgtcttcgatccgtggtatccgctgggaacggcgaatatgctgcaagtgctgcatatggggctgcatgtttgccagttgatgggctacgggcagattaacgatggcctgaatttaatcacccaccacagcgcaaggacgttgaatttgcaggattacggcattgccgccggaaacagcgccaacctgattatcctgccggctgaaaatgggtttgatgcgctgcgccgtcaggttccggtacgttatagcgtacgtggcggcaaggtgattgccagcacacaaccggcacaaaccaccgtatatctggagcagccagaagccatcgattacaaacgttgaacgactgggttacagcgagcttagtttatgccggatgcggcgtgaacgccttatccggcctacgtagagcactgaactcgtaggcctgataagcgtagcgcatcaggcaattccagccgctgatctgtgtcagcggctaccgtgattcattcccgccaacaaccgcgcattcctccaacgccatgtgcaaaaatgccttcgcagcggctgtctgccagctgtagtttatgccggatgcggcgtgaacgccttatccggcctacgtagagcactgaactcgtaggcctgataagcgtagcgcatcaggcaattccagccgcagacctgtgtcagcggttaccgactttcatttccgccaacaaccgcgcatttatccaacgccatgtgcaaaaatgccttcgcggcggctgtctgccagctatttttccgccgcaacaaaaccgccgttctctccagtagtggcggggcaagagaaatagctttaagcccgtcatgttgtgtggcaatcgctgctggtaacaatgtggaaagggaagtgcggcgaatcagctccagaaccgcgctaatactgttcgcctcaatgaccacctgtggatgtagccccgctttctcgcagtagtggtcaatttgctctctggtggcaaattccgcgctgagcaggaccagtttttcatcatgcaagcgactcaacgccacctgttcatggacggccagcggatgatgttgcgccacgactaacgctaaactttctgtcagtaaaggaattgcctccagctccgggctatgcacaggcgcgaaggcaatcccaacgtccaactcgtcgcggcaaagcatatcctcgattttctcctggctcatttcctgtagctggagcgtgatgctgggatagcgcgcatagaaatccgccattaaggggccgataaagtagctcgtaaaggtgggggtgacggcgatacgcaggcttcctcgcgtcagatcggcaacatcatgaatcgcccgtttacccgcccccagttcctgtaacgcccggctggcgtactgtcgccagacttctcctgcatcagtgagacgaatcgttcgcccgctacggtcaaacagcggcacgcctaaactctcctctaactggcgaatctgctgggaaagcgcaggttgggagacgtgcaacgcactggcggcacgggtgaagctgccatgttcagccacggcaagaaaataattgatatgtcgagagagcattcgcaacctataagtaaatccaatggaactcatcataaatgagacttttaccttatgacaatcggcgagtagtctgcctctcattccagagacagacagaggttaacggtgaaagagattattgatggattccttaaattccagcgcgaggcatttccgaagcgggaagccttgtttaaacagctggcgacacagcaaagcccgcgcacactttttatctcctgctccgacagccgtctggtccctgagctggtgacgcaacgtgagcctggcgatctgttcgttattcgcaacgcgggcaatatcgtcccttcctacgggccggaacccggtggcgtttctgctagcgtggagtatgccgtcgctgcgcttcgggtatctgacattgtgatttgtggtcattccaactgtggcgcgatgaccgccattgccagctgtcagtgcatggaccatatgcctgccgtctcccactggctgcgttatgccgatagtgcccgcgtcgttaatgaggcgcgcccgcattccgatttaccgagtaaagctgcggcgatggtacgtgaaaacgtcattgctcagttggctaatttgcaaactcatccaagcgtgcgcctggcgctcgaagaggggcggatcgccctgcacggctgggtctacgacattgaaagcggcagcatcgcagcttttgacggcgcaacccgccagtttgtgccactggccgctaatcctcgcgtttgtgccataccgctacgccaaccgaccgcagcgtaaccttatttttaaaccatcaggagttccaccatgattcagagtcaaattaaccgcaatattcgtcttgatcttgccgatgccattttgctcagcaaagctaaaaaagatctcagttttgccgagattgccgacggcaccggtctggcagaagcctttgtaaccgcggctttgctgggtcagcaggcgcttcctgccgacgccgcccgcctggtcggggcgaagctggatctcgacgaagactccattctactgttgcagatgattccactgcgtggctgcattgatgaccgtattccaactgacccaacgatgtatcgtttctatgaaatgttgcaggtgtacggtacaaccctgaaagcgttggttcatgagaaatttggcgatggcattattagcgcgattaacttcaaactcgacgttaagaaagtggcggacccggaaggtggcgaacgtgcggtcatcaccttagatggtaaacatctgccgaccaaaccgttctgacagccatgcgcaaccatcaaaagacgttcacgatgctgctggtactggtgctgattggtcttaatatgcgaccactgctcacctccgtcgggccactgctaccgcaattgcgccaggcgagcggaatgagctttagcgtggctgccctgttgaccgctctgccggtggttaccatgggcgggctggcgctggccggaagctggcttcatcagcatgtcagcgaacgtcgcagtgtcgccatcagtctgttgctgattgccgtcggtgcattgatgcgtgagctttacccgcaaagtgcgctgctgcttagcagcgcactgcttggtggggtggggatcggcatcattcaggcggtgatgcctagcgtgattaaacggcggtttcagcagcgcacgccactggtgatggggctgtggtccgcggctctgatgggcggcggtgggcttggtgccgccataacgccctggttagttcaacatagcgaaacctggtatcaaacactcgcctggtgggcgctgcctgccgttgttgcgctctttgcctggtggtggcaaagcgcccgcgaggtcgcctcttcccacaagacaacaaccactccggttcgcgtggtattcactccccgcgcgtggacgctgggtgtttacttcggtctgattaacggcggttacgccagcctgattgcctggttacccgctttctatattgagattggtgccagcgcgcagtacagcggttccttactggcattgatgacgcttgggcaagccgcaggagctttgctgatgcctgctatggctcgccatcaggatcggcgcaaactgttaatgctggcgctggtgttacaactggtggggttctgcggctttatctggctgccgatgcaattgccggtattgtgggcgatggtgtgtgggttaggtctgggcggcgcgtttccgctctgtttgctgctggcgctcgatcactctgtgcaaccggctattgctggcaagctggtggcgtttatgcagggaatcggttttatcatcgccgggcttgccccgtggttttctggcgtgctgcgtagtatcagcggcaattacctgatggactgggcatttcatgcgctgtgcgtcgttgggctgatgatcataaccctgcgttttgcaccagtacgttttccgcagctgtgggtcaaagaggcatgatgcgacgcttgttcctgcgctttgttcatgccggatgcggctaatgtagatcgctgaacttgtaggcctgataagcgcagcgtatcaggcaatttttataatttaaacactgctttcaactttataatctttgaaataatagtgcttatcccggtcgtttatttcgcgaataacccgacaaggaacgccagccgccacgacgtttggtggaatgtcttttgtgacgatactacccgcgccaataacagaattatccccgatggtgacgcctggattaataaccacatgacttccgatccagacgttattgccaatcgttatcggaaaagagtacatctcgccgttttttctcaattcatggtgtacagggtgtcccgtaacggaaagagtaacgttgggtgcaatcagtacgttatcaccgattgttaccgtgtagtcatcgacaatggttaaattgaaatttgcataaaaattgcggcctatatggatgttggaaccgtaagagaaatagacaggcggttctacccaggcgttttcccctaccgtggcaaacatttctttaatcaggctttctcttttttcaacttcacttggatggctgtgattaaactcatacattaacgttttcccacgaagtcttttttccggtaagccttcgcacatatcggtaaatagcttgcctgctcttattctttcggtcattggcatgttcaatgcgatcactccgttatgatatgttggtcggataaggcgctcgcgccgcatccgacattgattgcttaagcgacttcattcacctgacgacgcagcagggaaagcgggccggggccgctaagcgtgaacacggaaattaaggtgaagcccagcgccaccagacccagcaccagataagcgccctggaaaccgatgctttcatacatattgcccgccagtacagacataaaaatcatcgccagttgcttaaagaagcagaaacagaccagataaatcgtcgcactaaaacgcacttcaaactggctggtaatatatttaaagcagcccaccagcaggaacggtacttcaaacatatgcagcgttttcagaataaccacttccagcgcactggtggcgaagctactgccaataatacgtacagacataatagtgccagccagcagcagggcgtttttcccaccgatgcgattaatgatcagtggcgcaaagaacataatgctggcgttaagtaattcgcccattgtcgttacgtagccaaatacccgcgtaccctgttcaccggtagcaaagaagctagtaaagaaattagcaaactgttggtcaaaaacatcgtaggtgcaggaaacgccaataacatacagactcaaaaaccacagttttggctgtctgaacagttccagtgccagcttaaggctaaatgcgctatggttggcacctaccgcattggcaaccgtggcagaagagggcgcatccgttttggcgaaaaagagtaaaacggcgaggatgagtgcacagccagagcccagccagaaaacaaactgattattgatggtgaacatgatgccgacaatgctggcacacagcgcccagccaacacagccaaacatccgcgcgcgaccaaattcgaaattactgcgacggctgactttctcaataaatgcctctactgctggcgcaccggcgttaaaacaaaagcctagataaataccaccaacaatgcttcctactaaaatgttgtattgtaacagtggcccgaagataaaaataaagaacggcgcaaacatcactaacatgccggtaataatccacagcaggtatttgcgcagcccgagtttgtcagaaagcagaccaaacagcggttggaataataggctgaacagagaaatagcggcaaaaataatacccgtatcacttttgctgatatggttgatgtcatgtagccaaatcgggaaaaacgggaagtaggctcccatgataaaaaagtaaaagaaaaagaataaaccgaacatccaaaagtttgtgttttttaaatagtacataatggatttccttacgcgaaatacgggcagacatggcctgcccggttattattatttttgacaccagaccaactggtaatggtagcgaccggcgctcagctggaattccgcgcttacactcgggctccaggagtcgtcgccaccaatccccatatggaaaccgtcgatattcagccatgtgccttcttccgcgtgcagcagatggcgatggctggtttccatcagttgctgttgactgtagcggctgatgttgaactggaagtcgccgcgccactggtgtgggccataattcaattcgcgcgtcccgcagcgcagaccgttttcgctcgggaagacgtacggggtatacatgtcactcaatggcagatcccagcggtcaaaacaggcggcagtaaggcggtcgggatagttttcttgcggccctaatccgagccagtttacccgctctgctacctgcgccagctggcagttcaggccaatccgcgccggatgcggtgtatcgctcgccacttcaacatcaacggtaatcgccatttgaccactaccatcaatccggtaggttttccggctgataaataaggttttcccctgatgctgccacgcgtgagcggtcgtaatcagcaccgcatcagcaagtgtatctgccgtgcactgcaacaacgctgcttcggcctggtaatggcccgccgccttccagcgttcgacccaggcgttagggtcaatgcgggtcgcttcacttacgccaatgtcgttatccagcggtgcacgggtgaactgatcgcgcagcggcgtcagcagttgttttttatcgccaatccacatctgactaagaaagccactctggcggttaaattgccaacgcttattacccagctcgatgcaaaaatccatttcgctggtggtcagatgcgggatggcgtgggacgcggcggggagcgtcacactgaggttttccgccagacgccactgctgccaggcgctgatgtgcccggcttcactccatgcggtcgcgttcggttgcactacgcgtactgtgagccagagttgcccggcgctctccggctgcggtagttcaggcagttcaatcaactgtttaccttgtggagcgacatccagaggcacttcaccgcttgccagcggcttaccatccagcgccaccatccagtgcaggagctcgttatcgctatgacggaacaggtattcgctggtcacttcgatggtttgcccggataaacggaactggaaaaactgctgctggtgttttgcttccgtcagcgctggatgcggcgtgcggtcggcaaagaccagaccgttcatacagaactggcgatcgttcggcgtatcgccaaaatcaccgccgtaagcgctccacgggttgccgttttcatcatatttaatcaggctctgatccacccagtcccagacgaagccgccctgtaaacggggatactgacgaaacgcctgccagtatttagcgaaaccgccaagactgttacccatcgcgtgggcgtattcgcaaaggatcagcgggcgcgtctctccaggtaggctaagccattttttgatggaccatttcggcacagccgggaagggctggtcttcatccacgcgcgcgtacatcgggcaaataatatcggtggccgtggtgtcggctccgccgccttcatactgcaccgggcgggaaggatcgacagatttgatccagcgatacagcgcgtcgtgattagcgccgtggccactttcattccccaggctccagatgatcacactcgggtgattacgatcgcgctgcaccattcgcgttacgcgttcgctcatcgccggtagccagcgcggatcatcggtcagacgattcattggcaccatgccgtgggtttcaatattggcttcatccaccacatacaggccgtagcggtcgcacagcgtgtaccacagcggatggttcggataatggctacagcgcacggcgttaaagttgttctgcttcatcagcaggatatcctgcaccatcgtctgctcatccatgacctgaccatgcagaggatgatgctcgtgacggttaacgcctcgaatcagcaacggcttgccgttcagcagcagcagaccattttcaatccgcacctcgcggaaaccgacatcgcaggcttctgcttcaatcagcgtgccgtcggcggtgtgcagttcaaccaccgcacgatagagattcgggatttcggcgctccacagtttcgggttttcgacgttcagacgtagtgtgacgcgatcggcataaccaccacgctcatcgataatttcaccgccgaaaggcgcggtgccgctggcgacctgcgtttcaccctgccataaagaaactgttacccgtaggtagtcacgcaactcgccgcacatctgaacttcagcctccagtacagcgcggctgaaatcatcattaaagcgagtggcaacatggaaatcgctgatttgtgtagtcggtttatgcagcaagctgacgtcacggaaaatgccgctcatccgccacatatcctgatcttccagataactgccgtcactccagcgcagcaccatcaccgcgaggcggttttctccggcgcgtaaaaatgcgctcaggtcaaattcagacggcaaacgactgtcctggccgtaaccgacccagcgcccgttgcaccacagatgaaacgcgctgttaacgccatcaaaaataattcgcgtctggccttcctgtagccagctttcatcaacattaaatgtgaggctgtaacaacccgtcggattctccgtgggaacaaacggcggattgaccgtaatgggataggtcacgttggtgtagatgggcgcatcgtaaccgtgcatctgccagttactggggacgacgacagtatcggcctcaggaagatcgcactccagccagctttccggcaccgcttctggtgccggaaaccaggcaaagcgccattcgccattcaggctgcgcaactgttgggaagggcgatcggtgcgggcctcttcgctattacgccagctggcgaaagggggatgtgctgcaaggcgattaagttgggtaacgccagggttttcccagtcacgacgttgtaaaacgacggccagactatccgtaatcatggtcatagctgtttcctgtgtgaaattgttatccgctcacaattccacacaacatacgagccggaagcataaagtgtaaagcctggggtgcctaatgagtgagctaactcacattaattgcgttgcgctcactgcccgctttccagtcgggaaacctgtcgtgccagctgcattaaactatcggccaacgcgcggggagaggcggtttgcgtattgggcgccagggtggtttttcttttcaccagactgacgggcaacagctgattgcccttcaccgcctggccctgagagagttgcagcaagcggtccacgctggtttgccccagcaggcgaaaatcctgtttgatggtggttaacggcgggatataacaactgctgtcttcggtatcgtcgtatcccactacgctgatatccgcaccaacgcgcagcccggactcggtaatggcgcgcattgcgcccagcgccatctgatcgttggcaaccagcatcgcagtgggaacgatgccctcattcagcatttgcatggtttgttgaaaaccggacatggcactccagtcgccttcccgttccgctatcggctgaatttgattgcgagtgagatatttatgccagccagccagacgcagacgcgcgctgacagaacttaatgggcccgctaacagcgcgatttgctggtgacccaatgcgaccagatgctccacgcccagtcgcgtaccgtcttcatgggagaaaataatactgttgatgggtgtctggtcagagacatcaagaaataacgccggaacattagtgcaggcagcttccacagcaatggcatcctggtcatccagcggatagttaatgatcagcccactgacgcgttgcgcgagaagattgtgcaccgccgctttacaggcttcgacgccgcttcgttctaccatgctcaccaccacgctggcacccagttgatcggcgcgagatttaatcgccgcgacaatttggctcggcgcgtgcagggccagactggaggtggcaacgccaatcagcaagctctgtttgcccgccagttgttgtgccacgcggttgggaatgtaattcagctccgccatcgccgcttccactttttcccgcgttttcgcagaaacgtggctggcctggttcaccacgcgggaaacggtctgataagagacaccggcatactctgcgacatcgtataacgttactggtttcacattcaccaccctgaattgactctcttccgggcgctatcatgccataccgcgaaaggttttgcgccattcgatggtgtcaacgtaaatgcatgccgcttcgccttccggccaccagaatagcctggctttcaaccccttcttcgatctgttttgctacccgttgtagcgccggaagatgcttttccgctgcctgttcaatggtcattgcgctcgccatatacaccagattcagacagccaatcacccgttgttcactgcgcagcggtacggcgatagaggcgatcttctcctcctgatcccagccgcggtagttctgtccgtaaccctctttgcgcgcgcgcgccagaatggcttccagctttaacggttcccgtgccagttgatagtcatcaccggggcgggaggctaacatttcgattaattccttgcggtcttgttccgggcaaaaggccagccaggtcaggccgctggcggttttcagaagcggcaaacgtcgcccgaccattgcccggtgaaaggataagcggctgaaacggtgagtggtttcgcgtaccaccattgcatcaacatccagcgtggacacatctgtcggccataccacttcgcgcaacagatcgcccagcagtggggccgccagtgcagaaatccactgttcgtcacgaaatccttcgcttaattgccgcactttgatggtcagtcgaaaactatcatcggaggggctacggcggacatatccctcttcctgcagcgtctccagcagtcgccgcacagtggtgcgatgcaggccgctgagttccgccagcagcccgacgctggcaccgccatcaagtttatttaacatatttaataacattagaccgcgggttaagccgcgcacggttttgtattccgtctgctcattgttctgcatattaatactcatttctatagttaaaacaacgtggtgcacctggtgcacattcgggcatgttttgattgtagcgctaaacacccttcctatactgagcgcacaataaaaaatcatttacatgtttttaacaaaataagttgcgctgtactgtgcgcgcaacgacattttgtccgagtcgtgaggtactgaaatggcaatacaacaccctgacatccagcctgctgttaaccatagcgttcaggtggcgatcgctggtgccggcccggttgggctgatgatggcgaactatctcggccagatgggcattgacgtgctggtggtggagaaactcgataagttgatcgactacccgcgtgcgattggtattgatgacgaggcgctgcgcaccatgcagagcgtcggcctggtcgatgatgttctgccgcacactacgccgtggcacgcgatgcgttttctcaccccgaaaggccgctgttttgctgatattcagccaatgaccgatgaatttggctggccgcgccgtaacgcctttattcagccgcaggtcgatgcggtgatgctggaaggggtgagccgttttccgaatgtgcgctgcttgttttcccgcgagctggaggccttcagtcagcaagatgacgaagtgaccttgcacctgaaaacggcagaagggcagcgggaaatagtcaaagcccagtggctggtagcctgtgacggtggagcaagttttgtccgtcgcactctgaatgtgccgtttgaaggtaaaactgcgccaaatcagtggattgtggtagatatcgccaacgatccgttaagtacgccgcatatctatttgtgttgcgatccggtgcgcccgtatgtttctgccgcgctgcctcatgcggtacgtcgctttgaatttatggtgatgccgggagaaaccgaagagcagctgcgtgagccgcaaaatatgcgcaagctgttaagcaaagtgctgcctaatccggacaatgttgaattgattcgccagcgtgtctacacccacaacgcgcgactggcgcaacgtttccgtattgatcgcgtactgctggcgggcgatgccgcgcacatcatgccggtatggcaggggcagggctataacagtggtatgcgcgacgcctttaacctcgcatggaaactggcgttggttatccaggggaaagcccgcgatgcgctgctcgatacctatcaacaagaacgtcgcgatcacgccaaagcgatgattgacctgtccgtgacggcgggcaacgtgctggctccgccgaaacgctggcagggtacgttacgtgacggcgtttcctggctgttgaattatctgccgccagtaaaacgctacttcctcgaaatgcgcttcaagccgatgccgcaatattacggcggtgcgctgatgcgtgagggcgaagcgaagcactctccggtcggcaagatgtttattcagccgaaagtcacgctggaaaacggcgacgtgacgctgctcgataacgcgatcggcgcgaacttcgcggtaattggctggggatgcaatccactgtgggggatgagcgacgagcaaatccagcagtggcgcgcgttgggcacacgcttcattcaggtggtgccggaagtgcaaattcataccgcacaggataaccacgacggcgtactacgcgtgggcgatacgcaaggtcgcctgcgtagctggttcgcgcaacacaatgctagcctggtggtgatgcgcccggatcgctttgttgccgccaccgccattccgcaaaccctgggcaagaccctgaataaactggcgagcgtgatgacgctgacccgccctgatgccgacgttcctgtcgaaaaggtagcctgatatgcacgcttatcttcactgtctttcccacagcccgctggtggggtatgtcgacccggcgcaagaggtgctcgatgaggtcaatggcgtgattgccagcgcccgcgagcgtattgcggcattctcccctgaactggtggtgctgtttgcgccagatcactacaacggctttttctatgacgtgatgccaccgttctgtttaggcgttggagcgacggcaattggtgatttcggcagtgcggcaggagagctgcccgtgcctgtggagctggcggaggcctgtgcgcatgccgtcatgaagagcgggatcgatcttgccgtttcttactgtatgcaggtggaccacgggttcgcccagccgctggagttcctgctcggtgggctggataaggtgccagttctgcctgtgttcatcaacggtgtcgccacgccgctgcccggtttccagcgtacccgcatgttgggtgaagccattggacgtttcaccagcactctcaataaacgcgtgctgttcctgggttccggtgggctttcccatcagccgccggtgcccgaactggcgaaagccgatgcccatatgcgcgaccgtctgttggggagcgggaaagatttacccgccagtgagcgcgaattgcgtcagcaacgggtgattagcgccgctgagaagtttgttgaggatcagagaacgctgcatccgctcaacccgatttgggataaccagttcatgactttgctggagcagggacgcatacaggaactggatgccgtcagtaacgaagagctttccgccattgccggaaagagcacacatgaaatcaaaacctgggtcgccgcttttgccgctatttctgcgtttggcaactggcgtagcgaagggcgttattaccgcccaatcccggagtggattgccggatttggcagcttaagcgccagaacagagaactgaatatgcaggagaagatgatgagttatcagccacaaaccgaagccgccaccagccgttttctgaatgtagaagaagcgggtaaaacgctgcgcatccattttaatgactgcggacaaggcgacgaaaccgttgtcctgctgcatggttccggcccgggtgctactggctgggcgaacttcagccgcaatatcgatccgctggtagaggcgggctatcgggtgatcctgctggattgtccgggttggggcaagagcgatagcgtcgttaatagtggtagccgaagcgatcttaatgcacgaatcctgaaaagcgtggtggatcaactggatatcgccaaaatccacctgctgggcaacagcatggggggccatagttctgtggcgttcacccttaaatggccggagcgcgtcggcaaactggtgctgatgggcggcggtacgggcggcatgagtttgtttacgccgatgccaaccgaaggtattaagcgactgaatcagctttatcgtcagccgactatcgaaaacctgaagctgatgatggatatcttcgtttttgataccagcgatttgaccgacgccctgtttgaagcgcgcctgaataatatgctgagccgccgcgatcacctggaaaacttcgttaagagcctggaagctaatccgaaacagttcccggattttggcccacgtctggcggaaatcaaagcgcaaaccctgattgtctgggggcgcaacgaccgctttgtgccgatggatgcgggtctgcgtctgctgtccggcattgccggttctgaactgcatatcttccgcgactgtggtcactgggcgcagtgggaacatgccgacgctttcaatcaactggtgctgaatttcctcgcacgcccttaaggaatggtcatgacgaagcatactcttgagcaactggcggcggatttacgccgcgccgcagagcagggcgaagcgattgcaccgctgcgcgatctgattggtatcgataacgctgaagcggcttacgccattcagcacataaatgtgcaacatgacgttgcgcaggggcgtcgcgtggtagggcgtaaagtgggcctgacacatccgaaagtgcaacaacaactgggcgttgatcaaccggattttgggacgttatttgccgacatgtgttatggcgataacgaaatcattcctttttcccgtgttctgcaaccccgcattgaagcggagatcgcactggtgttgaaccgcgatttgcccgcaaccgatatcaccttcgacgaattgtataacgccattgaatgggtacttccggcgctggaagtggtggggagccgcattcgcgactggagcattcagtttgtcgataccgtggcagataacgcctcctgtggggtgtatgtcatcggcggtccggcgcaacgtccggcggggttagacctgaaaaactgcgccatgaagatgacgcgtaataacgaagaggtttctagcgggcgcggcagcgaatgcctgggacatccgcttaatgcggccgtctggctggcacgcaaaatggccagtctgggtgaaccgctgcgcaccggagatatcattcttaccggggcattaggtccgatggtggcggtgaatgcgggcgatcgttttgaagcccatattgaaggcataggtagtgttgctgcgacatttagtagcgcagccccaaaaggaagtctgagttgagctaagccccaaaaggaagtctgtcatgagtaagcgtaaagtcgccattatcggttctggcaacattggtaccgatctgatgattaaaattttgcgtcacggtcagcatctggagatggcggtgatggttggcattgatcctcagtccgacggtctggcgcgcgccagacgtatgggcgtcgccaccacccatgaaggggtgatcggactgatgaacatgcctgaatttgctgatatcgacattgtatttgatgcgaccagcgccggtgctcatgtgaaaaacgatgccgctttacgcgaagcgaagccggatattcgcttaattgacctgacgcctgctgccatcggcccttactgcgtgccggtggttaacctcgaggcgaacgtcgatcaactgaacgtcaacatggtcacctgcggcggccaggccaccattccaatggtggcggcagttagtcgcgtggcgcgtgttcattacgccgaaattatcgcttctatcgccagtaaatctgccggacctggcacgcgtgccaatatcgatgaatttacggaaaccacttcccgagccattgaagtggtgggcggcgcggcaaaagggaaggcgattattgtgcttaacccagcagagccaccgttgatgatgcgtgacacggtgtatgtattgagcgacgaagctagtcaagatgatatcgaagccagtatcaatgaaatggctgaggcggtgcaggcttacgtaccgggttatcgcctgaaacagcgcgtgcagtttgaagttatcccgcaggataaaccggtcaatttaccgggcgtggggcaattctccggactgaaaacagcggtctggctggaagtcgaaggcgcagcgcattatctgcctgcctatgcgggcaacctcgacattatgacttccagtgcgctggcgacagcggaaaaaatggcccagagtctggcgcgcaaggcaggagaagcggcatgaacggtaaaaaactttatatcagcgacgtcacattgcgtgacggtatgcacgccattcgtcatcagtatagcctggaaaacgttcgccagattgccaaagcactggacgatgcccgcgtggatagcattgaagtggcccacggcgacggtttgcaaggttccagctttaactatggtttcggcgcacatagcgaccttgaatggattgaagcggcggcggatgtggtgaagcacgccaaaatcgcgacgttgttgctgccaggaatcggcactattcacgatctgaaaaatgcctggcaggctggcgcgcgggtggttcgtgtggcaacgcactgtaccgaagctgatgtttccgcccagcatattcagtatgcccgcgagctcggaatggacaccgttggttttctgatgatgagccatatgaccacgccggagaatctcgccaagcaggcaaagctgatggaaggctacggtgcgacctgtatttatgtggtggattctggcggtgcgatgaacatgagcgatatccgtgaccgtttccgcgccctgaaagcagagctgaaaccagaaacgcaaactggcatgcacgctcaccataacctgagtcttggcgtggcgaactctatcgcggcggtggaagagggctgcgaccgaatcgacgccagcctcgcgggaatgggcgcgggcgcaggtaacgcaccgctggaagtgtttattgccgccgcggataaactgggctggcagcatgggaccgatctctatgcgttaatggatgccgccgacgacctggtgcgtccgttgcaggatcgaccggtacgagtcgatcgcgaaacgctggcgctgggatacgctggtgtttacagcagcttcctgcgtcactgtgaaacggcggcggcgcgttatggcttaagtgcggtggatattctcgttgagctgggcaaacgccggatggttggcggccaggaggatatgatcgttgacgtggcgctggatctgcgcaacaacaaataatgatgactgccgagaacgtgcattttgtatgcccatcccagcacgactgccggatgcggcgtgaacgccttatccggcctacggatggcgtgagaatttgtaggtctgataagacgcgttagcgtcgcatcaggcatctgcgcacgactgccggatgcggcgtgaacgccttatccggcctacggatggcgcgggaatttgtaggcctgataagacgcgttagcgtcgcatcaggcatctgcgcacgactgccggatgcggcgtgaacgccttatccggcctacgggtggcgcgagaatttgtaggcctgataagacgcgttagcgtcgcatcaggcatctgcgcacgactgccggatgcggcgtaaacgccttatccggcctacggatggcgcgggaatttgtaggcctgataagacgcgttagcgtcgcatcaggcatctgcacacgactgccggatgcgataaacgtcttgtccggcctacatttcgcccgtaggcagtcattaaatagttctgattacgcggctggcaatgtatcagtcgcgattcacctgcactcgcaacgaggttcatcttatgagcactcgtacccctagtagttctagttcccgcctgatgctgaccatcgggctttgttttttggtcgctctgatggaagggctggatcttcaggcggctggcattgcggcgggtggcatcgcccaggctttcgcactcgataaaatgcaaatgggctggatatttagcgccggaatactcggtttgctacccggcgcgttggttggcggaatgctggcggaccgttatggtcgcaagcgcattttgattggcagtgttgcgctgtttggtttgttcagtctggcaacggcgattgcctgggatttccccagtctggtctttgcgcggctgatgaccggtgtcgggctgggggcggcgttgccgaatcttatcgccctgacgtctgaagccgcgggtccacgttttcgtgggacggcagtgagcctgatgtattgcggtgttcccattggcgcggcgctggcggcgacactgggtttcgcgggggcaaacttagcatggcaaacggtgttttgggtaggtggtgtggtgccgttgattctggtgccgctattaatgcgctggctgccggagagcgcggttttcgctggcgaaaaacagtctgcgccaccactgcgtgccttatttgcgccagaaacggcaaccgcgacgctgctgctgtggttgtgttatttcttcactctgctggtggtctacatgttgatcaactggctaccgctacttttggtggagcaaggattccagccaagccaggcggcaggggtgatgtttgccctgcaaatgggggcggcaagcgggacgttaatgttgggcgcattgatggataagctgcgtccagtaaccatgagcctactgatttatagcggcatgttagctagcctgctggcgcttggaacggtgagcagttttaacggtatgttgctggcgggatttgtcgcggggttgtttgcgacaggtgggcaaagcgttttgtatgccctggcaccgttgttttacagtagccagatccgcgcaacaggtgtgggaacagccgtggcggtagggcgtctgggggctatgagcggtccgttactggccgggaaaatgctggcattaggcactggcacggtcggcgtaatggccgcttctgcaccgggtattcttgttgctgggttggcggtgtttattttgatgagccggagaagtcgaatacagccgtgcgccgatgcctgacgtgccttattaggcaggggcgaaagggacttcaccccaatacacctacggcgtttacaggtatactcgctaaaaattattcagcgggtttggaaacaaagatggcaaaacttaccttacaagagcagttgctcaaagcaggattagtcaccagcaaaaaagcggcgaaggtggagagaacggcgaaaaaaagccgcgttcaggcgcgtgaagctcgggcggcggtagaagaaaataaaaaggcacagcttgagcgtgataaacagcttagcgaacagcaaaaacaagcggcgttggcgaaagaatataaagctcaggtgaagcagcttattgaaatgaaccgaatcaccattgccaatggcgatattggttttaacttcactgacggcaatctgattaagaagatttttgtcgataagctcacacaggcgcagttgattaatggtcgtctggcgattgcccgcttgttggtcgataacaatagcgaaggtgaatacgccattattcccgccagcgttgccgataaaattgctcagcgcgatgccagcagtatagcgttgcacagcgcgctcagcgccgaagagcaggatgaagacgacccgtatgccgacttcaaagtgcctgatgatttgatgtggtaaacatagataagtcgtgcgcagatgcctgatgcgacgctatgcgcgtcttatcaggcctacggtttatgggcgaagtgtagaccggataaggcgttcacgccgcatccggcagtcgtgcgccatgcctgatgcgacgctttgcgcgtcttatcaggcctacggcttacgggcgaagtgtaggccggataaggcgttcacgccgcatccggcagtcgtgctattatcaacgcatattcagtttattggcgtggtaggcaatatgctcgccaataaaactggagacaaaataatagctgtgatcataaccctcgtgataacggattaacgtcttgatattcatctcctggcagatcttttcaagatttggagtccgcagctgttctgcgtaaaaatcatcactcaacccctgatcaaccatgatttccgcaacgcgttgaccttgactaataagactcaccgggtcgtaatccaaccaggcatctttattttcagcaagatatgcagcaaaggcttgctgtccccacggcacttggcttggggagacaatggggctaaacgcgctgacgctgacatattcatctgggttacgtaacgccagcaccagcgcgcccagcccgcccatagaatgaccagagatagactttttggccgttgccggaaaatgatgcatcactaaatccggcagctcgttgcggatatagtcatacattttgtaatgttcattccacggcgcttgcgtcgcgttcaggtaaaacccggcaccttgcccgagatcgtaacggtcagcatctgcgacatgactgcctcgcggactggtgtccggcgcaacaacaataatgttgtgctcagccgcgtaacgctgcatcccgcttttagtaatgaaattctgctcgttgcaggtcaggccactaagccagtacagcaccggcaatttttcattcgcggcttttggtgggagatagacgccgacattcatttcacatttcagactttgggaataatgccgatacatattttgccagccgccaaagctgacatgtttttcaatgagttccatcagtcattatctcagggttaatcccccggacggctgcccggggagagtattaagaacccccgcctgaagtggacggggtaaacctgcgggaaatcagtaacgaattacggttcgaatggatttgccttcatgcatcaggtcgaaggcgtcattaatttcatccaggctcatggtatgcgtgacaaacggttccagatcgatatcacctttcatcgcatcttcaaccatgcccggtaactgggaacgacctttcacgccgccaaacgcggaacctttccatacgcgaccagtgaccaactggaatggacgggtggagatttcctgaccggcaaccgcgaccccgatgatcacgctctgaccccagccgcggtgcgcactttccagcgccgcacgcatcacgttgacgttaccgatgcattcaaaggtatggtcgataccccatttgttgatatccaacaggacatcttttatcggtttgtcgtagtcattcgggttaatgcagtcggtagcaccgaagcgacgcgccagatcgaatttcttcgggttggtatcgatagcgataatccgacccgctttcgcctgacgcgcgccctgaaccactgccagaccaatcgcgccaagaccaaacacggcaacagaatcacctggctggactttagctgtgttgtgtaccgcgccaataccggtggtcacgccacagcccagcaggcagacgtgttcatggtttgcttctggattaatttttgccagagacacttccgcgactacggtgtattcactgaatgtagagcaccccatgtagtgataaagcggctgcccgttgtaagaaaaacgggtggtgccgtctggcatcaggcctttaccctgggtttcgcgaaccgcaacacagaggttagttttgccagaacgacagaactcacactcgccgcactccgcggtgtaaagcgggatcacatggtcgccaggtttgacgctggttacgccttcaccgacttcaaccacaacgccggccccttcgtgaccgagaaccaccgggaatacaccttccgggtcatcgccggagagggtaaatgcgtcggtatggcaaacgccggtatgggtgactttaattagcacttcaccttttttcggtggtgcaacgtcaatttcaacgatttccagcggtttaccgggagcaaatgcaacggcagcacgacttttcatctctcgctcttcctcaatatggtaatagattcagttatttaagataggcacgaaccagttcaatagtgtcgtcaacggattggctgacttcgcggctgtagcagtcatttcggtcaaacgtttcccggatatggctttcaagcacttctgccatcagcccattagccgcgccccgaacggcagcgatctgttggagtatggcacggcattcggcatcaccctccaggctccgttccagagcatcaatctgcccccgaatacgacgaactcgagtaaggacctttttcttctcttccggagtactgggcatttcgcacctcatcatctgcatgcaatatactataggggggtattctatatgtcaatgcatacccccctatagtatataacactggagaataaaatttatccggtgaatgtggtcggaaaacaaagaggaaaggggggggctaatcggcagggaaggccgccccggatagcgggcggcagaaggaatcagaatttccaggtcagacgggctgcaagttgcagaccgttacgagatggacggtcccctcgcccccttggggagagggttagggtgagggggcgttcaccgtactttcaacaggttaactccccctttctgagaggaaacaaaattaacgcagaatcttcttctcagccaaatccagcgcaaagtagctgaaaatcagatccgcacccgcacgcttaatgctacctaagctttcgagcacgactttctcttcatctatagcacccgccagcgcggcgaacttaatcatcgcatactcaccgctcacctgatacgcgccaatcggcaattcagtacgttcacgcagctcacgcacgatgtcgaggtacgctccagcaggtttaaccatcaggcagtctgcgccctgggcttcatccagcagactttcacgaatcgcctcacgacggttcattgggttcatctgatagcttttgcggtcgccttttaatgcgcttccggcagcttcacggaacgggccataaaaggaggaggcgaacttggtgctatagctcataatcgccgtatctttaaatcccgcagcgtccagcgcctgacgaatcgcctgtacctggccgtccatcgcggcggaaggggcgatgaagtctgcacctgcagcagctgcaaccacggcttgcttgcctaaattttccagagtcgcgtcgttgtcgacgccatgctcgcacagcacaccgcagtgaccgtgagaagtgtattcacagaagcaggtgtcactcataacgatcatttctggcacggtctgcttgcagatgcggctcatacgcgccaccagtccatcttcccgccaggcatcgctgccggtttcatcggtatggtgagagatgccaaaagtcatcacggaacgaataccggcgttggcgatgcgttcaatttcgcgtgccagatgtttctctggaatgcgcatcacgcctggcatggcttcaacggctttgtagtcgtcaatttcttcttcaacaaagatcggcaacaccaggtcgttaaggctaagtgttgtctcttcaaacatagcgcgcagcgcaggagatttgcgcaggcgacgagggcgttggattaagtctgtcatggtctgcctgatgtttgtggaatcgaggggcatagtatacctgaagcagggtagggatgttttacgaaagttgtcgcgatgttgacaagaagagaatggaagagaggccaggacatctttttaatagaaacagcaataattttatattcactgaaaatatttttaatcttgaatattatcgggcgttaaaatattacattgtggttttcaatgcgttatccgcagcgtgacgctccagcgccagttcaatcaaacgtgtgatcagatcggtgtaacccagaccgctggcttgccacagcttcggatacatactgatattagtgaagccaggcagggtgttgatctcgttgatcaccacttcgttctctggggttaaaaacacgtctacacgcgccatgcctgcgcatcccaacgtttgataagcctgaacggcaatcgcccggatcttatcgttgatttctggcgcaatggctgccggaactaccactttcgcgccatcttcgtcaatgtacttggtgtcgtaggcatagaaatcgctggtgagtacgatctctccacaggtgctggcttgcggattgtcgttgcccagaactgcgcattcgatctcacgacctttgatcccttgctcaacgatcactttatgatcgaactcgaacgccagatcgacggcaattgcgtactgttcttcactggttactttgctgacaccaacagaagagccctgattagccggttttacaaacagtggtaaccccagtttagactccacttcggcaaaactaatgttgtgacgattggcgcgcgtcagggtaataaatggcgcaatgttcagcccggcatcgcgtagcagacgtttggtgacatctttgtccatacaggctgcactagccagaacatcagaacctacaaacggtaaattggcgacccgcagcattccctgcaaggaaccatcttcgcccagcgtaccgtggacaatcgggaaaatgacatccaccgtcggcaacggctgaccgttttgcgcgtcgataagctgatgctcatgtttacctggcacctgcgcaaggctggtcgcgctagggcgcaacgcaatatgggcaggatcgtctgcatttagcagataattgctggcatcgctgacgtgccattgcccttgtttatcaatgcccagcagcacaacgtcgaagcgacttttatcaatggcatcgacaatgttttttgcgctttgcagagacacttcatgttccgcacttttaccaccaaaaacgattcctacccgcagtttttccatcttaaaaacctatcccgtctaacacaaagtgcatacattaccacgacaaaacgggggattcgcggccttctgaaagattgttgcaatcttctgctgacaaagcgtgcaacgtactggtgaagaaagtgcgttatctcaaagatgtgcgcaagatcacaaaaatgatgaacgggaagctaatttattcctggcttaaatggccatgcggtgagtttttttctcttaattataagttaacgaagagaatatatttcataacttttatttataataaaggttgataattaaaagcctatattttgtgtgggtaattatttaaataagagaaacgtttcgctggtaatcaaacaaaaaatatttgcgcaaagtatttcctttgtcataaaaataatacttccagacactatgaagttgtgaaacataatgttaacttctccatactttggataaggaaatacagacatgaaaaatctcattgctgagttgttatttaagcttgcccaaaaagaagaagagagcaaagaactgtgtgcgcaggtagaagctttggagattatcgtcactgcaatgcttcgcaatatggcgcaaaatgaccaacagcggttgattgatcaggtagagggggcgctgtacgaggtaaagcccgatgccagcattcctgacgacgatacggagctgctgcgcgattacgtaaagaagttattgaagcatcctcgtcagtaaaaagttaatcttttcaacagctgtcataaagttgtcacggccgagacttatagtcgctttgtttttattttttaatgtatttgtacatggagaaaataaagtgaaacaaagcactattgcactggcactcttaccgttactgtttacccctgtgacaaaagcccggacaccagaaatgcctgttctggaaaaccgggctgctcagggcgatattactgcacccggcggtgctcgccgtttaacgggtgatcagactgccgctctgcgtgattctcttagcgataaacctgcaaaaaatattattttgctgattggcgatgggatgggggacagcgaaattactgccgcacgtaattatgccgaaggtgcgggcggcttttttaaaggtatagatgccttaccgcttaccgggcaatacactcactatgcgctgaataaaaaaaccggcaaaccggactacgtcaccgacagcgctgcaagtgcaaccgcctggagtaccggtgtcaaaacctataacggcgcgctgggcgtcgatattcacgaaaaagatcacccaacgattctggaaatggcaaaagccgcaggtctggcgaccggtaacgtttctaccgcagagttgcaggatgccacgcccgctgcgctggtggcacatgtgaccagccgcaaatgctacggtccgagcgcgaccagtgaaaaatgtccgggtaacgctctggaaaaaggcggaaaaggaagcattaccgaacagctgcttaacgctcgtgccgacgttacgcttggcggcggcgcaaaaacctttgctgaaacggcaaccgctggtgaatggcagggaaaaacgctgcgtgaacaggcacaggcgcgtggttatcagttggtgagcgatgctgccagtctgaatagcgtgacggaagcgaatcagcaaaaacccctgcttggcctgtttgctgacggcaatatgccagtgcgctggctaggaccgaaagcaacgtaccatggcaatatcgataagcccgcagtcacctgtacgccaaatccgcaacgtaatgacagtgtaccaaccctggcgcagatgaccgacaaagccattgaattgttgagtaaaaatgagaaaggctttttcctgcaagttgaaggtgcgagtatcgataaacaggatcatgctgcgaatccttgtgggcaaattggcgagacggtcgatctcgatgaagccgtacaacgggcgctggaattcgctaaaaaggagggtaacacgctggtcatagtcaccgctgatcacgcccacgccagccagattgttgcgccggataccaaagctccgggcctcacccaggcgctaaataccaaagatggcgcagtgatggtgatgagttacgggaactccgaagaggatagtcaagaacataccggcagtcagttgcgtattgcggcgtatggcccgcatgccgccaatgttgttggactgaccgaccagaccgatctcttctacaccatgaaagccgctctggggctgaaataaaaccgcgcccggcagtgaattttcgctgccgggtggtttttttgctgttagcaaccagacttaatggcagatcacgggcgcatacgctcatggttaaaacatgaagagggatggtgctatgaaaataacattactggttaccttgcttttcggtctggtttttttaaccaccgtcggcgctgccgagagaactttaaccccacaacaacagcgtatgacctcctgtaatcagcaggcgacggcgcaggcgttgaaaggggatgctcgtaagacctacatgagtgattgcctgaagaacagcaagtctgcgcctggcgaaaaaagtttgacgccacagcagcaaaagatgcgcgaatgcaataatcaagcaacacaacaatctctgaaaggtgatgatcgtaataagtttatgagtgcctgcctcaagaaagccgcctgatacctgatagtgctaacgggtgagctacgaaaatggctcacccgaaatatcatacttctgcctttagctccgtctctataatttgggaaaattgtttctgaatgttcccaaaaataatgaatgatgaaaactttttcaaaaaagcggcggcgcacggggaggaacctcctttaactcctcaaaacgaacatcagcggtccgggctgcgcttcgcccgtcgcgtcagactaccccgtgcggttggcctggctggcatgttcttaccgattgctagtacgctggttagtcacccgccgccgggctggtggtggctggtgttggtcggctgggcgttcgtctggccgcatttagcctggcagatagcgagcagggccgtcgatccgcttagccgggaaatttacaacttaaaaaccgatgcagtattagcgggaatgtgggtaggcgtaatgggcgtaaacgtgctgccttccaccgcgatgttgatgattatgtgtctgaatttgatgggggcaggcggcccccgtctgtttgtcgcgggtctggtgttgatggtggtttcctgccttgtcaccctcgagctgacgggcattaccgtgagcttcaatagtgcgccgctggaatggtggctctcccttcccattattgtcatttatcctctgctgtttggctgggtcagctaccagacggcaaccaaactggcggaacataaacgcaggttgcaggtcatgagtacccgcgacggcatgacgggcgtgtataaccgacgtcattgggaaactatgttacgcaatgaatttgataactgtcggcggcataatcgcgatgcaacgttactgattatcgatatcgaccatttcaagagcatcaacgatacctggggccatgatgtgggcgatgaagcgattgtggcgcttacccgacagttacaaattgccctgcgcggtagcgatgtgattggtcggtttggcggcgatgagtttgcagtaatcatgtccggtacgccagctgagagcgccattaccgccatgttacgggtgcatgaagggctaaatacattacgtttgccgaatacgccacaggtaactttacggattagtgtgggggttgcgccgctgaacccacaaatgagtcactatcgtgagtggttgaaaagcgcagatttggcgctttacaaagcaaagaaagccggacgtaaccgcaccgaagtggcggcctgacgtccggcgaaagtcatcaggatttgctgagtttttcacttttttccatacacttcgtcatcgcttcgatcactgcagcacggaagcctttctcttccagtacgcgtaccgcttcaatggtggtgcctcccggactgcagaccatatctttcagtgcccccggatgttctcccgtttccagcaccatttttgcggaacccattaccgcctgagcggcaaatttatacgcctgggcgcgtggcatcccgcccagcacggcggcgtcggccatcgcttcgataaacataaatacgtaggctgggctagaaccgctcacaccgaccaccgggtggatcatcggctcagcaattacttccgcttcgccaaagcagcggaaaatattcagcacatcagcggtatcttctggggttaccagcgcgtttggcgttacggaggtcatcccggcattaaccagtgcgggagtgttcggcatggcgcggataattttccggtcatggcccagcgcgcgggcaagctggtcgagcgtgacacctgcagcaatagaaacgaccagagagtctttattcaggctggaggtgatttcgctaagcactttaatcatgatgccaggtttaacggcagcaaaaatgatgtcggcgatttgcgccacttcttgcgcgctttctgcggcgttgatgccgaactggtcatgcagggcggcgactttatccggggagggggtgtatacccagatttgccctggaagcacctgaccgctggcaatcagaccgccgagaatggcttttcccatattgccgcagccaataaaaccgattttcttttccattgcctcactcctgccgtgaaattcattgttttgataatcgctggcagaagcataaacagaactatgccggaaggcaaaagcgcgacacaatagaggattacccaacaaaggatgactttatgacaatttgggtggatgccgacgcgtgtcccaatgtaattaaagagattttgtatcgcgcggcggaacgtatgcagatgccgctggtactggtagcaaaccagagtttacgcgtgccgccaagccgatttattcgtacgctgcgcgtcgcggcaggtttcgacgttgccgataacgaaattgtccggcagtgtgaagcgggcgatttggtgatcaccgcagatatacctttggctgctgaagccatcgagaaaggcgctgcggcgcttaatccgcgcggcgaacgttacacgccagcgaccattcgtgagcgcctgacgatgcgcgattttatggataccttacgtgccagtgggatccagaccggcggaccagatagccttagtcaacgtgaccgccaggcctttgccgcggagctggagaagtggtggctggaagtgcaacgtagtcgtggctaaatgtaatttattatttacacttcattcttgaatatttattggtatagtaaggggtgtattgagattttcactttaagtggaattttttctttacaatcgaaattgtactagtttgatggtatgatcgctattctcatgacaccggctttcgccgcattgcgacctattggggaaaacccacgatgacacaacctctttttctgatcgggcctcggggctgtggtaaaacaacggtcggaatggcccttgccgatagccttaaccgtcggtttgtcgataccgatcagtggttgcaaagtcagctcaatatgacggtcgcggagatcgtcgaaagggaagagtgggcgggatttcgcgccagagaaacggcggcgctggaagcggtaactgcgccatccaccgttatcgctacaggcggcggcattattctgacggaatttaatcgtcacttcatgcaaaataacgggatcgtggtttatttgtgtgcgccagtaagtgtcctggttaaccgactgcaagctgcaccggaagaagatttacggccaaccttaacgggaaaaccgctgagcgaagaagttcaggaagtgctggaagaacgcgatgcgctatatcgcgaagttgcgcatattatcatcgacgcaacaaacgaacccagccaggtgatttctgaaattcgcagcgccctggcacagacgatcaattgttgattttcgagcgcctatacttaacgttcatcccgtgaaataaggaagaacgatgccaacgaaaccgccttatcctcgtgaagcatatatagtgacgattgaaaaaggaaagccaggacagacggtaacctggtaccaactcagagccgatcatcctaaaccagacagcttgatcagtgaacatccgaccgctcaggaagcgatggatgcgaaaaaacgctatgaggaccctgacaaagagtgaccgcatcagactgctcggaagggattctgagtgccactacaagggatctgcgtcacatttttcataattcatgtttttctaataattagaatattaaacaataacaatccattactggaatcatttggaatctttacattatgccgtgcacgtctgctgctacgctttttgtcatttgtagcacaagtaagtgtcagcagtggtgcttcacacttgcccggtaattaacgacgaaagaaaagtaaggtggatgaacaatgagtgcgagcttggcgatcctgaccatcggcattgtacctatgcaggaagttttgccgctcctgacggaatacattgacgaagataatatttcccatcatagcctgctggggaagttaagtcgtgaagaagtgatggcggagtacgcgccagaagcaggcgaagacaccattctcacattattaaatgacaaccagctggcccatgttagccgtcgcaaagtggagcgtgacctgcaaggtgtggttgaagtgctcgataatcagggttatgacgtcattttattaatgagtacagcaaacattagtagtatgactgcgcgtaatacgatctttcttgagccgagccgaatattgcctccactggtttcctctattgttgaagatcatcaggtgggggttatcgttccggttgaggagatgctgcccgttcaggcgcaaaaatggcaaattttgcagaaaagcccggtatttagtttgggtaaccccattcatgatagtgaacaaaaaatcattgatgccgggaaagaattactggcaaaaggggctgatgtcatcatgctggattgtttaggatttcaccaacgtcatcgcgatttactgcaaaaacagctcgatgttcctgtcttgctgtctaacgtattgattgcacggctggctgcggaattactggtgtaattttgcgtgacagccagcgcctctggcccctatagtgaagtagatgttcaactaccaaacagggccagtttatgcttcaaagtaatgagtacttttccggcaaagtgaaaagtatcggcttttccagcagcagcactggtcgcgccagcgtgggtgttatggttgaaggcgaatacaccttcagcaccgctgagccggaagagatgacggtaatcagtggcgcgctgaatgtgttactgcctgacgcgaccgactggcaggtgtatgaagccggtagcgtgtttaatgttcccggtcacagtgagtttcatctgcaagttgccgaacccacctcttatctgtgccgctatctgtaattcctcgccttccccttgaacgggagggcatttttctgaaatatcctttctttagcccataataatatttcctttgctgcgattttttcaatttccgatatattcataatttatcaaggttgatataaatatcagtgaagatctccagatattgttgcggaactggctacgataaaagataaatcagatgatgaatggtggcgtgcattgctgcaaagtcgcaatgatcatttacgccaaacggcattgcgcaacgcacataccccggcgttgttgttaacgacattgactgagcctcaggatcggagcctggctattaataatccacagctggctgccgatgtgaaaacggcgtggttaaaagaggatccaagtttactcttatttgtcgaacaacccgatcttagcctgttacgtgatttagtgaaaaccggggcaacgcggaaaattcgcagtgaagcgcgtcaccggcttgaggaaaaacaatgacacaacgtccatggagcaagttacagcgtaaaacgcataatattgctgcgctaaaaattattgctcgccgtagcgaataattatatgcctggtgtggcttcgtacgccggataagacgcggcaggcgtcgcatccggcattaaaggaaaatcagcaattaacgttgtgcttcgccacctaatccttcaatcaggttttgaattaacgctgccagttcaccagtcatcaggatgaaatcggcatcaaaacgctgggcgaaatcttcacggtcgatatcttcgttttgatcgcgcagctcgtcgcagaacttcagacgcttgaggctaccatcgtcgcacatcacaaactgaatgcgctgctgccagtcgagcgccagtttagtcaccacttttccggcttcaatgtgattggtgatctcttcgctggtcagatcttgtttcttcgcgcggatcacgccgccatcttccagcaagcttttcagctcggcttcatcaagcagctggaagccctgtgccgcactgccggagcgaacccattcggtcagcgtcagttcaatcgggttttccatgctcaatggtacaaccggtaagctccccaggcttttacgcagtaatgccagcgtatcttccgcttttttggcactggcgcagtccaccataatcaaaccgttaaccgtgtcgatccacatcattgtctggctaaaacggctgaaagcacgcggcagcagagagtgcagcacttcgtctttcaggctatctttttcggttttcttcagcttacgcgcctgttccgcttccagtttggcgattttcgcttccagcgcctgtttaatcaccggagacgggaggattttttcttctttgcgcgcgcagataacaatttgaccattggcaacgtgcgttaacgcatcgctgtggcttcccatcggaggaacccagcccatcttcgccatgtcctggctgccgcatggggtaaatgccatgctggctagctgtttttccatctcttctgcacgcaggctaatctcgcggctaagacggtaaaccattaaatttttgaaccacagcatgataatttccacggccttgtcgttaaatttagcgggcatgataacgaattgtcggcggccttgcattgccaatccggttgtccgtctctacgctattgatattgaaaaaaataaggagagtaccgtgcgtataggtatcgatttaggcggcaccaaaactgaagtgattgcactgggcgatgcaggggagcagttgtaccgccatcgtctgcccacgccgcgtgatgattaccggcagactattgaaacgatcgccacgttggttgatatggcggagcaggcgacggggcagcgcggaacggtaggtatgggcattcctggcagtattagcccttacaccggtgtggtgaagaatgccaatagtacctggctcaacggtcagccattcgataaagacttaagcgcgaggttgcagcgggaagtgcggctggcaaatgacgctaactgtctggcggttagtgaagcagtagatggcgcggcagcgggagcgcagacggtatttgccgtgattatcggcacgggatgcggcgcgggcgtggcattcaatgggcgggcgcatatcggcggcaatggcacggcaggtgagtggggacacaatccgctaccgtggatggacgaagacgaactgcgttatcgcgaggaagtcccttgttattgcggtaaacaaggttgtattgaaacctttattagcggcacgggattcgcgatggattatcgtcgtttgagcggacatgcgctgaaaggcagtgaaattatccgcctggttgaagaaagcgatccggtagcggaactggcattgcgtcgctacgagctgcggctggcaaaaagcctggcacatgtcgtgaatattctcgatccggatgtgattgtcctggggggcgggatgagcaatgtagaccgtttatatcaaacggttgggcagttgattaaacaatttgtcttcggcggcgaatgtgaaacgccggtgcgtaaggcgaagcacggtgattccagcggcgtacgcggcgctgcgtggttatggccacaagagtaaaaaacgtaggcaattggcgcatcatgcctgatgcgacgcttgccgcgtcttatcaggcctacaaaaggtgccagaaccgtaggccggataaggcgttcacgccgcatccggcaataagtgctccgatgcctgatgcgacgcttgccgcgtcttatcaggcctgcaaaatgtgccagaaccgcgtagggcggataaggcgttcacgccgcatccggcaataagtaatgagcaccgagactataacttaccccagtggtttcgccagcaccggagtatccgccgcttgctggcgcttatagcgaccatacagcagcaagctgctcatcgcagcaaagctaagcagggcggcaggcagcgccacgtaattatatgccagccccagcgtcagcatcatacctccgcaatatgcgccgacggcgctaccgaggttaaacgctatttgcccacctgcggcacctaataactctccgcctttggcgttttgtagtaacaatatttgtagcggtgcactaagggcaaataatcccgcgcaacaaataaaagcaaaaataaggctcgttgttttcatgccgccgcagaaaaagagcatcagcagtgccagtacaattataaagtcagttactgctgcaatgcgcagtggactataacgtccactaatcctgccacttagcatatttcccagcaccatccctagcccaactaacatcataataaaggtcatcgccgtttcgctaaaaccggaaataaacatcatgtatggctttacgtagctgaaccaggcaaacacacctgcgttgccaaacatcgtggcggcgaaaattaaccacggggccgggctgcgcaaaaagtgaaattgttcgcgcagatttcctttcgcctcgtcgcgaatatctggcacccaaaaatagacgcttgccatcaccgcaatattaaaaacagcgatcaataaaaaggtgtaacgccagctaaattcctgacttaaatacgttcccagcggaatgcccagcaaattggcgactgtcatcccggaaaccatccccgccacggcggcggtgacttttccgggtttgataattttacttaacacgatcgctccgacgccaaaaaatgcgccatgcggaaagccggataccagccgaccaatggcgagcatcaggtaagagctagagagcgtgaacatggcgttgccaatgacgcacaacgccaccagaaacaacaagatatgtttgagactgtagcggctggaaaagagtgcgatgattggcgcaccgaccaccacccccagtgcataatagctgatcatatgcccggcggcaggaatgctaattcctacgttatgcgccagctccgtgagcacgcccataatgccaaattcggccatccccaaaccaaacgtgcccagagccaaagataaaatgacttttttcataccaccatcacaaccaccagaacggctaccaatcaccgtagccaataaagtgatagcttgcaggataacgaccagcaaggccaagagataattcgcccctctgtattcattatcctgctgaatagttatttcactgcaaacgtactttccagtttgctgtagcccaggccgttgatctttttcactttgatctgcaccggaatacgctctttcatcgcttctacgtggctaatcacaccgatggttttgccactggcgttcagggcatccagcgcatcaagggcggtatccagcgtttcgctatccagcgtgccaaaaccttcatcaaggaacaggctgtcaatacgtgttttatggctgaccagatcgctaagcgccagcgccagcgccagactaacgaggaaactttcgccgccggaaagggtacgggtatcgcgtaccgcatctgcctgccaggtatcaacaacctcgacttccagcgcctcgctggctttgcgctgtaacagatagcgcccgtgcagccgggtaagttgctgattagcgagatggactaaattatccagcgtcagcccctgggcaaacttgcggaatttatcgccctctttggaacctattaggctattcagatatccccagtcctcaacctgctgcgtcatttgagcaatttgctgcattaaggtttgttgttgctgacggttatctgcatcctgcttcagctgctggcgaatctcgccttgactcgtggtgttttcacgcaacttttggtgagtttgcgctaactcttgctgaatctgctccaccgtcacagtgagagccaacccgtcgtcaggtcggtgttgttgatgctgtgccagcgtttctgctgtctgagtgaccagagtttgcgcctgacggcgctggttttccagattctgcttgagctgttccagctgcgttagtgtttgttcatccattagcgccgcaaggaacgcctgctgatcgtcaaagacgctggcctgtagcgcggtgtcaaactgcgcctgggctttttgcagactttgcgccgccagaacatcctgttgctgtaacgtctgctgctggctgtgtaatgcgagacattgttcatgtacctgccgccagttttccaataccacagtttcttcgcagtgcgggagttcatcactttgcggcaacgtttccagaatcggcgtcagctgctgaatacggttttgcagcgcggttaattcgttctggcgttgctgccagctctgcgcttcttgctgacgtgtcgccaaccagctctcttcttcatcttcctgtggcaatgtcagtgcataacccgtcaatgtcgttaaaagtagttgctggcgttgttcaatttgctgttgatactggataatttgctgattatgcgcggcaatctgcccttgtaattcatgccgttggctgagtaaccgcagctggcgttcgtgctcatcttgtgcatccagccacggttgaatatcgtccagtggctgcaaggtgatattgaggctggccgtgacggcttgccattgttgagtaagtgcttgctcatcttgtcggaggctttgcgcttcgttttcatcacgctgaagctgctttgttatggcgtccagttgcccacgtagcgtcgcaccttcttcaccgagctttttaacttcgttttccagcgccagtaatcgagactgattaacgccaggctccagcgcctgatacgcctcgaccgccgggtggctggtggaaccacaaagtgggcaaggctgacccgcctgtaactgtgcacgttgagcttccagcgttttgatgcgcgcttcctgctcgcaaatggttttcacatcggcaagttgctgcgtcttttctttataacgctggcgcatttcgttaagtgcggcgttacgttgcgtctgttcttgcgtgacattctggatagcgacctgtaactgcgccagacgtttttgttggggaacaatctgtccatgcagcgcgaccaggtgctgacgcagtgggcgttgctcagcatgttgcgccagggcggtagcaacttcatcggcggttaacgtcaacgtgatcgccgcaagcgcattaagtttttgctcagcatgggttaactgttgctgccattgccgcagatgctcgcgatcgctggtttgttgggagaactgcgcacgccaacccgccggttcgttgttccactgacggaagcggtcgtgttcctgtaaccaggtattcaggctttgttgctgctgctgtaattctgcactctgcttcgccgcgtggtggcgaatgctcgcgcgaagcgccattgtgctctgtaagcgagtatttacttcttcaatctgctggcgaatatgcgccagcgccgcgctgtgttctgcgatgcgttcccagtgtggacgaagatttcgtgccggttgtgccagactaagcgccgccagttgaggttgcgctttttcttcttcggctaacgcctgttgcaaggcctgctgacggcggctggcttcttgctgcaattcgtcctgacgcgttaaccagtttaggctttgttgttcttgctgctgcgcggtaattaactgtttttcttcgtcagtaagtacctgcaaactcgctgtcaggctttgcacttgttccggcgtgagcaacgtgacgccgctggcctgcgcttgcagcttctccagctctgtgcgggcgcttttgtgctgctcaaaaaccatcgcgctgatttgcccgtagatttcagtgccggttaactcctcgagcaattccgcgcgttctttgggtttggcattcaggaaggcagcaaattgcccctggctaagcagcatgctacgggtgaagcgcccgtaatccagcccggttaacgtcgctgtcagttccagcttatctttcactttgtcggcgagaattttgccgtcggcgcagcgcgccagctctacgcgtggcacctgcaaattaccgtcgggttggttacgcgcccgattctggctccagaatgcacggtacgcttcacctttcacttcaaactccacctccgccagacattcggcggtatcgcgggtcatgagatcattttggctttgactaacgttagagagacgcggagtttcgtgatacagcgccagacaaatggcgtccagcagggtggttttccccgcacctgttgggccggtaatagcaaacagcccgttgctggcgaacggctcgcgggtgaaatcaatcttccattcgccttttaaactgttcaggtttttcaggcgcaggctgagaattttcatgcttcgtgttctccggcgagggtatgcaacgtcgtggtgaaaagatgctgcagacgttgctgctggctttcatccagttcttccagtgccagacggcgattgaacacctcttcgacgctgagttcgctgagggtttcacgctgttggctggctaacacacgctcgcgctgttcacgactccgacgtaccagcaatacttcgacaggcaaactttcggttaatgcctggattttgcgctgaatatcatgcagatactcatcagtagtgatttcgatatccagccagacaggtggctcctggcttacatcgcgccactgttccagctgtgcggtaatgctcgccagatcgcctttcagcactgccatgggttgcgttaccggtacgttcaggttttccacgctctctaatttgccgttactaaatgtcaccagatggacatatttactcttaccgcattcatcaaaactcagtggaatgggggagccgcaatagcgaacatgttccatgccgccaataatctgtgcgcggtgaatatgcccgagcgcgatgtagtcggctggtggaaagttttgtgccggaaacgcgtccagcgtgccaatataaatgtcacgcacggcgtcacttttactggcccccacggtcgttaaatgtcccgtggcgatgatgggcagaggctgatcgccgcgcagtttgcaggcatcggcatagtgttgttggtaataatcggtaatcgctgccagtaaatgctgctgtttttcaataccgttaagccccgcctggctggtaataatgtcacgcggacgtaaaaacggaatggggcacagcactgcgcctggcgtcccgtcgcgacgaggcaagatttgcggcgcatgtccggcgctggcgaccacggtagtattgaggaacgccatgatatcgcggctttcattcagcgtggcgacgctgtcatggtttcctgccagtaccaccagatgacagccagtttgctgtaaattgacaacaaaacggttgtataacgtgcgggcgtaactgggcgggctgccggtatcgaaagcatcaccggcaacaataatcgcatccacctgatgggtttgtgctgtctccagcagccagtcaagaaaagcctgatgttcagcttcgcggcttttactgtagaagttctggccgagatgccagtcactggtgtgaaggatgcgcataacggttccctggcgaaaaagcatgggcgcgattatacccaaacagatgtgccatttgcttttttctgcgccacggaaatcaataacctgaagatatgtgcgacgagcttttcataaatctgtcataaatctgacgcataatgacgtcgcattaatgatcgcaacctatttattacaacagggcaaatcatggcgagacgtattctggtcgtagaagatgaagctccaattcgcgaaatggtctgcttcgtgctcgaacaaaatggctttcagccggtcgaagcggaagattatgacagtgctgtgaatcaactgaatgaaccctggccggatttaattctcctcgactggatgttacctggcggctccggtatccagttcatcaaacacctcaagcgcgagagcatgacccgggatattccagtggtgatgttgaccgccagaggggaagaagaagatcgcgtgcgcggccttgaaaccggcgcggatgactatatcaccaagccgtttagcccgaaggagctggtggcgcgaatcaaagcggtaatgcgccgtattagcccaatggcggtggaagaggtgattgagatgcagggattaagtctcgacccgacatctcaccgagtgatggcgggcgaagagccgctggagatggggccgacagaatttaaactgctgcacttttttatgacgcatcctgagcgcgtgtacagccgcgagcagctgttaaaccacgtctggggaactaacgtgtatgtggaagaccgcacggtcgatgtccacattcgtcgcctgcgtaaagcactggagcccggcgggcatgaccgcatggtgcagaccgtgcgcggtacaggatatcgttttagtacccgcttttaacgccttgctcatcggacgcagagcagggcttatgatttcttaactggagtatcttacgtgctggaacggctgagctggaaaaggctggtgctggagctgctactttgctgcctcccggctttcatcctgggtgcattttttggttacctgccctggtttttgctggcaagcgtaacaggactgcttatctggcatttctggaatttattgcgccttagttggtggctgtgggtggatcgcagtatgaccccgccaccggggcgtggtagctgggaaccgctactatacggcttacaccagatgcagctgcgaaataaaaaacgccgccgtgaactgggcaatctgattaaacgctttcgtagcggcgcggagagcctgcccgacgcggtggtgctgaccacggaagagggcggtattttctggtgtaacggtctggcgcaacaaattcttggtttgcgctggccggaagataacgggcagaacatccttaacctactgcgttacccggagtttacgcaatatctgaaaacgcgtgatttttctcgcccgctcaatctggtgctcaacaccgggcggcatctggaaattcgcgtcatgccttatacccacaaacagttgctgatggtggcgcgtgatgtcacgcaaatgcatcaactggaaggggcgcggcgtaacttttttgccaacgtgagccatgagttacgtacgccattgaccgtgttacagggttacctggagatgatgaatgagcagccgctggaaggcgcggtacgcgaaaaagcgttgcacaccatgcgcgagcagacccagcggatggaaggactggtgaagcaattgctgacgctgagcaaaatagaagccgcaccgacgcatttgctcaatgaaaaggttgatgtgccgatgatgctgcgcgttgttgagcgcgaggctcagactctgagtcagaaaaaacagacatttacctttgagatagataacggcctcaaggtgtctggcaacgaagatcagctacgcagtgcgattagcaacctggtctataacgccgtgaatcatacgccggaaggcacgcatatcaccgtacgctggcagcgagtgccgcacggtgccgaatttagcgttgaagataacggaccgggcattgcaccggagcatattccgcgcctgaccgagcgtttttatcgcgttgataaagcgcgttcccggcaaaccggcggtagcggattagggttagcgatcgtgaaacatgctgtgaatcatcacgaaagtcgcctgaatattgagagtacagtaggaaaaggaacacgtttcagttttgttatcccggaacgtttaattgccaaaaacagcgattaatccgcctttgtcatcttttattgccataagccagtcgatgctggcttattttctttgcagtcaaaatacgggcgttagattttacaacgattggtgattttttgttcgcatgattagccatgtctttttcacggaaatagtgttttatactggttggtgatttcttatcgctatatacctctggtttttagatccctccttgctttaaaacgttataagcgtttaaattgcgcttcaggtgctgtcatactgactgcattaacgcggtaaatcgaaaaactattcttcgccgcgcctggttgggagtatttcccgctaaaattgtttaaatataccgctgtatcatccccagggattggcacaaaaatttaacgttacaacaccacatccacaggcagtatgatttatgacccatcaattaagaagccgcgatatcatcgctctgggctttatgacatttgcgttgttcgtcggcgcaggtaacattattttccctccaatggtcggcttacaggcaggcgaacacgtctggactgcggcattcggcttcctcattactgccgttggcctgccggtattaacggtagtggcgctggcaaaagttggcggcggtgttgacagcctcagcacgccaatcggtaaagtcgctggcgtactgctggcaacggtttgttacctggcggtggggccgcttttcgctacgccgcgtacagctaccgtttcctttgaagtggggattgcgccgctgacgggtgattccgcgctgccgctgtttatctacagcctggtctatttcgctatcgttattctggttagcctctatccgggcaagctgctggataccgtgggcaacttccttgcgccgctgaaaattatcgcgctggtcatcctgtctgttgccgctattgtctggccggcgggttctatcagcacggcgactgaggcttatcaaaacgctgcgttttctaacggcttcgttaacggctatctgaccatggatacgctgggcgcaatggtgtttggtatcgttattgttaacgcggcgcgttctcgtggcgttaccgaagcgcgtctgctgacccgttataccgtctgggctggcctgatggcgggtgttggtctgactctgctgtacctggcgctgttccgtctggggagtgacagcgcgagcctggtcgatcagtctgcaaacggcgctgctattctgcatgcttacgttcagcacacctttggcggcggcggtagcttcctgctggcggcgttaatcttcatcgcctgcctggtaacggcagttggcctgacctgtgcttgtgcagaattctttgcccagtacgtaccgctctcttatcgtacgctggtgtttatcctcggcggcttcagcatggtggtttctaacctcggcttaagccagctgatccagatctccgtaccggtgctgaccgctatttatccgccgtgtatcgcactggttgtattaagttttacacgcagttggtggcataatagctcccgcgtgattgctccgccgatgtttatcagcctgctttttggtattctcgacgggatcaaagcatctgcattcagcgatatcttaccgtcctgggcgcagcgtttaccgctggccgaacaaggtctggcgtggttaatgccaacagtggtgatggtggttctggccattatctgggatcgcgcggcaggtcgtcaggtgacctccagcgctcactaaatcactgaacatttgttttaaccacggggctgcgatgccccgtggttttttattgtgttgatgggttaggaattgatggaaagtaagaacaagctaaagcgtgggctaagtacccgccacatacgctttatggcactgggtagtgcaattggcaccgggctgttttacggtagcgcagacgccatcaaaatggccggtccgagcgtgttgttggcctatattatcggtggtatcgcggcgtatatcattatgcgtgcgctgggggaaatgagcgtacataacccggccgccagctctttcagccgttatgcgcaggaaaacctcggcccgctggcaggttacattaccggctggacctactgctttgaaatccttattgtcgccatcgccgatgtgaccgcttttggtatctatatgggtgtctggttcccgacggtgccgcactggatttgggtactgagcgtggtgctgatcatttgcgccgtaaacctgatgagcgtgaaggtattcggtgagctggaattctggttcagcttctttaaagtcgccaccatcatcatcatgattgtcgccggtttcggcatcatcatctgggggattggcagcggcgggcaaccgaccggtattcataacctgtggagcaacggcggcttcttcagtaacggctggcttggcatggtaatgagcttgcaaatggtgatgtttgcttacggtgggatcgaaattatcgggattaccgccggtgaagcgaaagatcctgagaaaagcataccgcgtgcgattaactccgtgccgatgcgtattctggtgttctacgtcggtacgctgttcgtcattatgtctatctacccgtggaatcaggttggcactgccggtagcccgttcgtgctgacgttccagcatatgggcattacctttgccgccagcattcttaactttgttgtgctgactgctagcctgagcgcaattaacagtgatgtatttggcgtaggccgtatgctccacggtatggcagagcagggcagcgcgccgaaaattttcagcaaaacgagccgtcgcggtattccgtgggttacggtgctggtgatgactaccgcgctgctgtttgcggtgtatctgaactacatcatgccggaaaacgtcttcctggtgatcgctagcctggcaaccttcgccacggtgtgggtgtggattatgatcctgctgagccaaattgccttccgtcgccgtttgccgccagaagaagttaaggcgctgaaatttaaagtgccgggtggggtagcaacgaccatcggcgggctgattttcctgctctttattatcgggttgattggttatcacccggatacgcgtatcagcctgtatgtcggtttcgcgtggattgttgtgctgttgattggctggatgtttaaacgccgccacgatcgtcagctggctgaaaaccagtaatccttgcgttctgtaagccggttcaggaggaaatcctgatccggctattccgaaagttatccgcccccgtcctcctcccccaaatatccttcagatgatgagtgatcctgcattaggctatggcaaggtgatcagattttcatcacaggggaattatgatgttaaatgcatggcacctgccggtgcccccatttgttaaacaaagcaaagatcaactgctcattacactgtggctgacgggcgaagacccaccgcagcgcattatgctgcgtacagaacacgataacgaagaaatgagtgtaccgatgcataagcagcgcagtcagccgcagcctggcgtcaccgcatggcgtgcggcgattgatctctccagcggacaaccccggcggcgttacagtttcaaactgctgtggcacgatcgccagcgttggtttacaccgcagggcttcagccgaatgccgccggcacgactggagcagtttgccgtcgatgtaccggatatcggcccacaatgggctgcggatcagattttttatcagatcttccctgatcgttttgcgcgtagtcttcctcgtgaagctgaacaggatcatgtctattaccatcatgcagccggacaagagatcatcttgcgtgactgggatgaaccggtcacggcgcaggcgggcggaagtacgttctatggcggcgatctggacgggataagcgaaaaactgccgtatctgaaaaagcttggcgtgacagcgctgtatctcaatccggtgtttaaagctcccagcgtacataaatacgataccgaggattatcgccatgtcgatccgcagtttggcggtgatggggcgttgctgcgtttgcgacacaatacgcagcagctgggaatgcggctggtgctggacggcgtgtttaaccacagtggcgattcccatgcctggtttgacaggcataatcgtggcacgggtggtgcttgtcacaaccccgaaagcccctggcgcgactggtacagctttagtgatgatggcacggcgctcgactggcttggctatgccagcttgccgaagctggattatcagagcgaaagtctggtgaatgaaatttatcgcggggaagacagtattgtccgccactggctgaaagcgccgtggaatatggacggctggcggctggatgtggtgcatatgctgggggaggcgggtggggcgcgcaataatatgcagcacgttgccgggatcaccgaagcggcgaaagaaacccagccggaagcgtatattgtcggcgaacattttggcgatgcacggcaatggttacaggccgatgtggaagatgccgccatgaactatcgtggcttcacattcccgttgtggggatttcttgccaataccgatatctcttacgatccgcagcaaattgatgcccaaacctgtatggcctggatggataattaccgcgcagggctttctcatcaacaacaattacgtatgtttaatcagctcgacagccacgatactgcgcgatttaaaacgctgctcggtcgggatattgcgcgcctgccgctggcggtggtctggctgttcacctggcctggtgtaccgtgcatttattacggtgatgaagtaggactggatggcaaaaacgatccgttttgccgtaaaccgttcccctggcaggtggaaaagcaggatacggcgttattcgcgctgtaccagcgaatgattgcgctgcgtaagaaaagtcaggcgctacgtcatggcggctgtcaggtgctgtatgcggaagataacgtggtggtatttgtccgcgtgctgaatcagcaacgtgtactggtggcaatcaaccgtggcgaggcctgtgaagtggtgctacccgcgagtccgtttctcaatgccgtgcaatggcaatgcaaagaagggcatgggcaactgactgacgggattctggctttgcctgccattagcgctacggtatggatgaactaacgttttataacgccttgcgactcgcctgcgccatcatccgcggataaaactgccagaagcgggtttcgagggcgtcataatgagcgtctaaatcgtaccaggagtcacgcagggcatccagacgtgggcggcggcttgccatgccgtttaacacgttctggatgaaatccatatcgcgatagcgcaccagccactgctcactccacaagtaattgttcagattgataaaacgtggcggactgtccggcaaaatcgtcatcacttgctcgcgggcataacagacaaattcctgtagcggaaagtccgggctcagctggctccagtggcgggaaagaaagtgatcccacatgacatccagcgtaataggcgcaacgcggcgcgtttcactacgaaaccactcccgtgcttcgcggacttccggcagattgtcagtcaatacgtcgatacgtcgatgcatatgaatgccagccacgacgtcgggcggaaaactttcttcaggatttccgcgtacgaaatcagccagtaaattgccggaaaggctgctttccgcgagatgggctaaatgcaggtgagctaaaaaattcatcgattatattctatccaaaagggggtaaaggttgcagggagagcgccccggcactagactacccgcctcttattttagtctgagtcagtgtcatgcgcgttaccgatttctcctttgaattgcccgaatccctgattgcccactatcccatgcctgaacgcagtagctgtcgtttactgagcctggacgggccgacgggcgcgctgacgcacggtactttcaccgatttacttgataagctcaaccccggcgatcttctggtttttaataatacccgcgtgatcccggcgcgcctgtttgggcgtaaagccagcggcggcaagattgaagtgctggttgaacggatgctcgacgacaaacgcattcttgcgcatattcgcgccagcaaagcgccaaaacctggcgcagaactgctgctgggcgatgacgaaagtattaacgcaacaatgaccgcgcgccacggcgcactgtttgaagtcgaatttaatgatgaacgcagcgtgctggatattctcaacagcatcggccatatgccgctgccgccgtatatcgaccgtccggacgaagacgctgaccgcgaactttatcaaaccgtttatagcgaaaaaccgggcgcggttgcagccccgaccgcaggtctgcattttgacgagcctttgctggaaaaattgcgcgccaaaggcgtggagatggcgtttgtgacgttgcacgttggtgcgggcaccttccagccggtgcgcgtcgacaccattgaagatcacatcatgcacagcgaatacgctgaagtaccgcaggatgtggtagacgcggtactggcggcgaaagcgcgcggtaaccgggtgattgcggttggcaccactagtgtacgtagcctggaaagcgcggctcaggcagcgaaaaacgatctcattgaaccgttcttcgacgatacccaaatctttatctatccgggcttccagtacaaagtggtcgatgcgctggtgacgaacttccacttgccagagagcacgctgattatgctggttagcgcctttgccggttatcaacacaccatgaacgcctataaagcagcggtagaagagaaatatcgcttttttagttacggtgatgcgatgtttatcacgtacaatccgcaggcaattaatgagcgcgtcggggagtaattccgcggcgctggtttaaaacgttggactgtttttctgacgtagtggagaaaaaatgaaatttgaactggacaccaccgacggtcgcgcacgccgtggccgcctggtctttgatcgtggcgtagtggaaacgccttgttttatgcctgttggcacctacggcaccgtaaaagggatgacgccggaagaagttgaagccactggcgcgcaaattatcctcggcaacaccttccacctgtggctgcgcccgggccaggaaatcatgaaactgcacggcgatctgcacgattttatgcagtggaaggggccgatcctcaccgactccggcggcttccaggtcttcagccttggcgatattcgtaaaatcaccgaacagggcgtgcacttccgtaacccgatcaacggcgatccgattttcctcgatcctgaaaaaagtatggagattcagtacgatcttggtagcgatatcgtcatgatctttgatgagtgtacgccgtatcctgctgactgggattacgcaaaacgctccatggagatgtctctgcgttgggcgaagcgtagccgtgagcgttttgacagtctcggaaacaaaaatgcgctgtttggtatcatccagggcagcgtttacgaagatttacgtgatatttctgttaaaggtctggtagatatcggttttgatggctacgctgtcggcggtctggctgtgggtgagccgaaagcagatatgcaccgcattctggagcatgtatgcccgcaaattccggcagacaaaccgcgttacctgatgggcgttggtaaaccagaagacctggttgaaggcgtacgtcgtggtatcgatatgtttgactgcgtaatgccaacccgcaacgcccgaaatggtcatttgttcgtgaccgatggcgtggtgaaaatccgcaatgcgaagtataagagcgatactggcccactcgatcctgagtgtgattgctacacctgtcgcaattatagtcgcgcttacttgcatcatcttgaccgttgcaacgaaatattaggcgcgcgactcaacaccattcataaccttcgttactaccagcgtttgatggcgggtttacgcaaggctattgaagagggtaaattagagagcttcgtaactgatttttaccagcgtcaggggcgagaagtaccacctttgaacgttgattaatattaataatgagggaaatttaatgagcttttttatttctgatgcggtagcggcaacgggtgcaccggcgcaaggtagcccgatgtctttgattttgatgctggtggtattcggtctgattttctatttcatgatcctgcgtccacagcagaagcgcaccaaagaacacaaaaagctgatggactccattgccaaaggtgatgaagttctgacgaacggtggcctggttggtcgcgtaaccaaagtagcggaaaacggctacattgctatcgcgctgaatgacaccactgaagtagttattaaacgtgacttcgtagctgccgtcctgccgaaaggcaccatgaaggcgctgtaattaaaatttttccctaagggaattgccgtgttaaaccgttatcctttgtggaagtacgtcatgctgatcgtggtgattgtcatcggtctgctgtatgcgcttcccaacctgtttggtgaggatccggctgttcagatcactggtgcgcgcggagtcgccgccagtgagcaaacgctgatccaggtccagaaaacgttacaagaagaaaaaataactgctaagtctgtggcactggaagagggcgctattcttgcgcgcttcgactccactgacacccagttgcgcgctcgtgaagcattaatgggcgttatgggtgacaaatacgtcgtggcgcttaaccttgccccggcaacgccgcgctggctggcagctattcacgctgagccgatgaagctcggccttgacctgcgtggcggcgttcacttcctgatggaagtggatatggacaccgcgcttggcaaactccaggaacaaaatatcgatagcctacgcagtgacctgcgcgaaaagggcatcccgtataccactgttcgtaaagaaaacaactacggcctgagcatcactttccgcgatgctaaagctcgtgatgaagccattgcgtatctgagcaagcgccatccggacctggtgattagcagccagggcagcaaccagctgcgtgcggtaatgagcgatgctcgtctgagtgaagcgcgtgaatatgcggtgcagcagaacattaatatcctgcgtaaccgtgtaaaccaacttggcgtggcggagccggtggttcagcgtcagggtgctgaccgtatcgttgttgaactgccaggtattcaggacactgcgcgtgcgaaagagattctgggtgcgacggcaacgctggaattccgtctggtaaacaccaacgttgaccaggccgctgcggcatccggtcgcgtaccgggcgactctgaagtgaaacagacccgcgaaggtcagccagttgtgctgtacaaacgcgtaattctgaccggtgaccatatcaccgactccacttccagccaggacgaatacaaccaaccgcaggttaacatcagcctcgatagcgctggtggtaacatcatgtctaacttcactaaggacaacatcggcaaaccgatggcaaccctgtttgtggagtacaaagacagcggtaagaaagatgcaaatggtcgtgcggttctggtgaaacaggaagaggtgattaacatcgccaacatccagtctcgtctgggtaacagcttccgtatcaccggcatcaacaacccgaacgaagcccgtcagctgagtctgctgctgcgtgccggtgcgttgatcgcgccgattcagattgttgaagaacgtaccattggcccaaccctgggtatgcagaacattgaacaggggctggaggcttgccttgccggtctgctggtttctattctgttcatgatcatcttctataagaagtttggtctgattgcgaccagtgctctgattgccaacttgatcttaatcgtcggcattatgagcctgttgccaggcgcaacgctgagtatgccaggtatcgcgggtatcgtcttaacccttgcggtggcggtcgatgcgaacgtactgatcaacgaacgtattaaagaagagttgagcaacggacgtactgttcaacaggcaattgatgaaggttatcgtggcgcattcagttctatcttcgatgcgaacatcaccacgctgattaaagtcatcatcctgtacgcagtgggtaccggggcaattaaagggttcgcgattactaccggtatcggtgtggcgacgagcatgtttaccgcgattgtcggtacgcgtgccatcgtaaacctgctatatggcggcaagcgcgtcaagaagctgagtatctgaggagtgcgatgtggcacaggaatatactgttgaacaactaaaccacggccgtaaagtctatgactttatgcgctgggactactgggctttcggcatctctggtctgctgttaatcgctgctatcgttattatgggcgtgcgcggctttaactgggggctggatttcaccggtggtacggttattgaaattacgctcgaaaaaccggctgaaattgacgtaatgcgtgatgcattgcaaaaagccggttttgaagagccgatgctgcaaaactttggtagcagccatgacatcatggtccgtatgccgcctgctgaaggcgaaaccggcggtcaggtgttgggcagccaggttctgaaggtgattaacgaatccaccaatcagaatgcagcagtgaagcgtattgagttcgtcggtccgagcgtgggggcagaccttgcgcaaaccggtgcgatggcgttgatggcagcgctgctgtctatcctcgtgtacgtaggtttccgctttgagtggcgactggcggcaggggtggttattgcgctggcgcacgacgttatcattacgctgggtattttgagcttattccatatcgagattgacctgaccattgtggcaagcttgatgagcgttatcggttacagccttaacgacagtatcgtggtaagcgaccgtattcgtgaaaacttccgcaagatccgtcgcggtacgccttacgaaatctttaacgtgtccttgacccagacgctgcaccgtaccttgatcacatccggtactaccttgatggttatcctgatgctgtacctcttcggtggtccggtactggaaggcttcagcctgaccatgcttatcggtgtttccatcggtactgcatcttccatctatgtggcatctgcgttggctctgaaactgggtatgaagcgcgaacacatgttgcagcagaaagtggaaaaagaaggggcggatcagccgagtattctgccgtaatcaagttcccgttgatgttgaaaatcccggtcagaagatcgggattttttttgatgtatggagattgcgaaaatccccgcatcttgggaaactgcgcgtaaccctacatttcatccaggtaacttttcatggctatcatcccaaaaaactatgcgcggttagaaagcggctatcgcgaaaaagcattaaaaatctatccgtgggtctgcggtcgctgttcccgcgagtttgtttattccaacctgcgtgaacttaccgttcaccacattgatcacgaccataccaataacccggaagatggcagtaactgggaattgttgtgtctctattgccacgatcatgagcatagcaaatataccgaagcggatcagtatggtacgaccgttatcgcaggggaagatgcgcagaaagatgtcggtgaagcgaagtacaacccattcgctgacctgaaagcgatgatgaacaagaagaagtgattaaaacgtaaaattgcctgatgcgctacgcttatcaggcctacgttatttcagcaatatattgaatttacgtgcttttgttggccggacaaagcgtttacgccgcatccggcatgaacaaagcacacgttgttaacaatcagaaatgccgggaataaatcccggcattttcataatcagaagttgtaacctactaccaggtaaccaccccagccggtagagcgaacgttgaagttgccgttgccgaagttcagttctgcatcgtcgttccactgaccaccgtcgtgccagtaacgagctacgacagagtagtgccagtgatcgtagttcagagccagaatatggctggaagcgatagagttattagtacgggtcttaataccgttgattgcgttaccgctgtcatcccctaaatcggaaccccagtcgaagttggtgaagccgatgtagctcagctgaccgccccacagatcggtaatcggcacaaagtatttaattttgaaacggtaaccgtcccactcgttttcgttcgctgcgccatagttctgccactggtatttcgcatagacgttcatggacaggctcatcggcaggccagtgtcgatatcggtacccagacccatgtaccaggtgctctggcgaccatctttattacgacccatgtcgtaaatgtagttgttcgcgaagtaccactctttgaacggaccgaagctaaggtcagtattggtcagcttgtcgatggagaaacgtggttcgatttccataaacagcggagaaccgtggttccagatacctttagcatcggagttaccgccgaagaataccggcgcatccgcataaccatagaagtcgaaccagtcttttttagcgaatgcttcgtactcaaggtaggtatcgttgcggatctgcggtccgaaacgggtgtgatagcttccgacaacgttaacgctctggtgccaccagtcggaaagatactgcggtttgtcgttttcagctgcgttgacagtaaaagagctagagagcgccagtaccgcaccggctgccagtaatgtttttttcatatgtatgccactgtttgaaaatcccttgcgggagtgaaaaaggcgcaaattgcgtttctaaatatttcgtatacagaggagcctattataaaaatcattgctcacaaaaatatgtttcgtttcacagttctatcatttacgtaatcgattgcgttcacgtttacacacattcgggcggggattgtactgactttcgcccttgttgcaaacttttactatcaatccaggtgatgtaagcagagtaacaaaatgacggggaaagatgttgcgggacgcacaaaatcgtcccgaaatacgtttactgcataacaggttgaatgtcgtggatacgtacaaagcctaactgatccacagaaatcccctttaactgtaacggaatatcaacatcgctgggggcgaggacgctggcaggggcattaatcaattgattctgcacattgatttcctgaaagttgtctattgttccctgaatttgcccatattcaacagttccgctgaatgcgggcaagggatcattgctctcaccctgaatacgtagtgtaagggtggtgccatctgcatcaggcgtaatattcaccaggctcatacgtaaagtaccgatctggctttccagtcttgccggtgttttcgctccaggcagaaggtaaaccccactgctggattttgcattcagcctgttttgctgagtgattttgactgtttcttgattgagttgcgtcatctcctggttcagcgtgctgacgctgtgtttcatctgtcgcacttcactttgctgcacacaggcgctaaggctgaacaggcttcccagcaggagcagtcgaaaaacgttagtattcataggtcgtccctttctcgtcgcaattagcctaatggtagagggtaaaagcagcgaaagcatcgatcctttatctcaaaagcgttgcgcctttgttgtatcgtcagttcagggtaaaatagatttccgttaaccacctggtcaggacgccgtatgcattgcccattctgtttcgccgtggacactaaggtaattgactctcgtctcgtgggcgagggtagttccgtacgccgccgtcggcagtgtctggtgtgtaatgaacgtttcaccacctttgaagtggcggagctggttatgccgcgtgttgtaaaaagcaacgacgtgcgtgaaccgtttaatgaagagaaattgcgtagcggaatgctgcgggcgctggaaaaacgtccggtgagttccgatgacgtcgaaatggcaatcaatcatattaaaagccagctgcgcgccaccggtgagcgcgaagtgccgagcaagatgattggcaatctggtgatggagcaattgaaaaagctcgataaagtcgcctatatccgttttgcctctgtctaccgcagtttcgaagatatcaaagaatttggcgaagagatcgcgcgcctggaggactaagccgtgcaggacgagtattacatggcgcgggcgctaaagctggcgcaacgaggacgttttaccacgcatcccaacccgaatgtcgggtgcgtcattgtcaaagatggcgaaattgtcggtgaaggttaccaccaacgtgcgggtgaaccacatgccgaagtacacgcgttgcgtatggcgggtgaaaaagccaaaggtgcgaccgcctatgtcacactcgaaccctgtagccatcatggtcgtacgccaccgtgctgtgacgcactcatcgccgctggcgtagcgcgcgtggttgccagcatgcaagatcctaacccgcaggtcgctgggcgtggactttaccgtctgcaacaggctggcattgacgtcagccacggcctgatgatgagtgaagccgagcaattgaataaaggctttctcaagcggatgcgcaccggctttccttatattcagttaaaacttggcgcaagccttgatggtcgcacggcgatggcgagcggcgaaagccagtggatcactagcccccaggcgcggcgtgatgtacaactactgcgcgcgcaaagtcatgccattttaaccagcagcgccacggtgctggcggatgatcctgccttaacggtgcgttggtctgaactggatgaacaaactcaggcgctctatccgcaacaaaatctccgtcagccgatacgtattgtgattgatagccaaaatcgcgtgacgccggtacatcgcattgtgcagcagcccggcgaaacctggttcgcgcgtacgcaggaagattctcgtgagtggccggaaacggtgcgtaccttgctgattccagagcataaaggtcatctggatctggttgtactgatgatgcaactgggtaaacagcaaattaacagcatctgggtggaagcggggccaacgctcgctggcgcattgctgcaggcgggtttagtcgatgagctgattgtctatatcgcacctaaactattaggcagcgacgcccgcggattatgcacgctgccagggcttgagaaattagccgacgccccccaatttaaattcaaagagatacgtcatgtaggcccggatgtttgcctgcatttagtgggtgcatgatctcccggctcgaaagggaagcagcgcacgaaatattatgctaaaatccgcccccctgcggggccatactcgaacccgaaggaagaaaatgaacattattgaagctaacgttgctaccccggacgctcgcgtcgccatcaccatcgcgcgtttcaacaactttatcaatgacagcctgctggaaggtgcaattgacgcactgaaacgtatcggtcaggtaaaagatgaaaacattaccgttgtttgggtgcctggtgcctatgagctgccgctggcggcgggtgcactggctaaaaccggtaaatacgacgcggtgattgcgctgggtacggttattcgtggtggcactgcccactttgaatatgtcgctggtggtgcaagcaacggcctggcgcatgttgcccaggacagcgaaattccggttgcttttggggttctgaccactgaaagcattgaacaagcgatcgaacgtgctggcaccaaagctggcaacaaaggtgcagaagctgcactgaccgcgcttgaaatgattaatgtattgaaagccatcaaggcctgaaattagtaaggggaaatccgtgaaacctgctgctcgtcgccgcgctcgtgagtgtgccgtccaggcgctctactcctggcagttgtcccagaacgacatcgctgatgttgaataccagttcctggctgaacaggatgtaaaagacgttgacgtcctgtacttccgtgagctgctggccggggtggcgactaataccgcatacctcgacggactgatgaagccatacctgtcccgcctgctggaagaactgggacaggtagaaaaagcagtactgcgcattgcgctgtacgaactgtctaaacgtagcgatgtgccatacaaagtggccattaacgaagcgatcgaactggcgaaaagcttcggcgcagaagacagccataagttcgtcaacggcgtactcgataaagcagcacctgtgattcgccctaacaaaaagtgatatccaggccggtagattcacggaagaccgttccatgatcgccggccttttcttttttacctgctgaggcataacgtatggcatgtggcgagttctccctgattgcccgttattttgaccgtgtaagaagttctcgtcttgatgtcgaactgggcatcggcgacgattgcgcacttctcaatatccccgagaaacagaccctggcgatcagcactgatacgctggtggcgggtaaccatttcctccctgatatcgatcctgctgatctggcttataaagcactggcggtgaacctaagcgatctggcagcgatgggggccgatccggcctggctgacgctggcattaaccttaccggacgtagacgaagcgtggcttgagtccttcagcgacagtttgtttgatcttctcaattattacgatatgcaactcattggcggcgataccacgcgtgggccattaagtatgacgttgggtatccacggctttgttccgatgggacgagccttaacgcgctctggggcgaaaccgggtgactggatctatgtgaccggtacaccgggcgatagcgccgccgggctggcgattttgcaaaaccgtttgcaggttgccgatgctaaagatgcggactacttgatcaaacgtcatctccgtccaagcccgcgtattttacaggggcaggcactgcgcgatctggcaaatagtgccatcgatctctctgacggtttgatttccgatctcgggcatatcgtgaaagccagcgactgcggcgcacgtattgacctggcattgctgccgttttctgatgcgctttctcgccatgttgaaccggaacaggcgctgcgctgggcgctctctggcggtgaagattacgagttgtgtttcactgtgccggaactgaaccgtggcgcgctggatgtggctctcggacacctgggcgtaccgtttacctgtatcgggcaaatgaccgccgatatcgaagggctttgttttattcgtgacggcgaacctgttacattagactggaaaggatatgaccattttgccacgccataaagatgtcgcgaaaagtcgcctgaagatgagtaatccgtggcatctacttgctgtcggattcggaagtggattaagcccgatcgttcctgggacgatgggcagcctggcagcgattccgttctggtatctgatgacctttttgccctggcagctctacagcctggtggtgatgctggggatctgtatcggcgtctatctttgtcatcaaacggcgaaagacatgggtgtgcacgatcatggcagcattgtctgggacgaatttattggtatgtggatcacgctcatggcgctgccgaccaatgactggcagtgggttgccgccgggtttgtgattttccgtattctggatatgtggaagccgtggccgatccgctggtttgatcgcaatgtgcatggcggcatggggatcatgatcgacgatattgtcgccggggtgatttccgcaggcatcctgtattttatcggtcatcactggccgctgggtattctgagctaattgtgcaccgatgcctgatgtgacgcttgtcacgtctcatcaggcctggactcttatttaaatcctacgacaggatgcggtttatacggcgtttccagttcggcaatctgttccggcttcaaagtgatatccaccgcgttcaatagctcatcaagctgttcttcgcggctagttccgataatcggtgcggcaatgcccggtttactcaacaaccaggccagcgcaacttgtgctcgtgtcgcccccagttcttcactgacgcctgttaaccgctctgcgatctgcgcgtcattttcatcgctttctttatagagatttttccccacctcatcagacaccagtcgtgcggtagtttctccccacggacgcgtcagacggccccttgccagcgggctccatggaattaccgccacgccctcctgataacacagtggtagcatctcgcgctcttcttcacgataaatcagattgtagtgatcctgcatactgacaaactgcgcccagccgtgctgtttttggagttccagtgcctgagcaaactggctagcgtgcatactactcgcgccgatataacgcgctttcccggcttttaccacgtcgttgagggcttccagcgtctcttcgatcggcgtgttgtaatcccagcgatgaatttgcaggatatcgacataatccatgccgagacgtcgcaggctgtcgtcgatagagcgcaaaatttgcgcacgggataatccttccggtaaatcaccaacgcgatggaacactttggtcgcaacgaccacgtcttcacgacgggcgaaatcccgcagtgcgcgaccgacgatctcttcgctgctgccgtcagaataactgttggcggtatcaaagaaatttatgccgccttccagtgcacgtttaattatgggacggctgctttcttccggcagtgtccatgcgtgattaccgcgatctggctcgccaaaggtcatacagccgaggcaaagtcgggaaacgcgaaggtcggtttttcctaaggggttgtattgcatgctgccactcctgctatactcgtcatacttcaagttgcatgtgctgcggctgcattcgttcaccccagtcacttacttatgtaagctcctggggcttcactcgtttgccgccttcctgcaactcgaattatttagagtctatgaataatttcttaagcatagcaggagtggagtagggattatgccagccaggccttgattttggcttccataccagcggcatcgaggccgagttcggcgcgcatttcttcctgagttccttgcggaataaagaagtccggcaggccaatgttcagcacgggtactggtttacgatgggccatcagcacttcgttcacgccgctgcctgcgccgcccataatggcgttttcttctacggtgaccagcgcttcatggctggcggccatttccagaattaacgcttcatcaagcggtttcacaaaacgcatatcgaccagcgtggcgttcaggctttcggcgactttcgccgcttctggcatcagcgtaccaaagttaaggatcgccagtttctcgccacgacgcttcacaatgcctttgccaattggtagtttttccagcggcgtcagttccacgccgaccgcgttgccacgcgggtagcgcaccgcactcgggccatcgttatagtgatagccggtatagagcatctggcgacattcgttttcatcgctcggggtcataatgaccatttccggtatgcagcgcaggtaagagagatcaaaagcaccctgatgggtttgaccgtcagcaccaacaatgcccgcgcggtcgatggcgaacaggaccggaagcttttgaatcgccacgtcatgcagcacctgatcataggcgcgttgcaggaaagtggagtaaatcgcgacaatgggtttgtacccaccaatcgccagacccgcagcaaaggtcaccgcgtgttgctcggcaattgccacgtcgaagtagcgatccgggaatttacgactaaactcgaccatgccggaaccttcacgcatcgccggagtaatcgccatcagcttgttgtctttcgctgccgtttcgcacaaccagtcgccaaagattttactatagctcggcaaaccgccgctacttttcggcaaacaaccgctggagggatcaaatttaggcacggcgtggaaagtgatcgggtctttttctgccggttcataaccacgaccttttttggtcatgatatgcaggaactgcgggcctttcaggtcgcgcatgttctttagcgtggtgataagccccagcacatcgtgaccgtccaccgggccgatgtagttaaagcccagctcttcaaacaacgtgccaggcactaccatgcctttaatatgttcttcggtgcgtttgagcagctctttaattggcggcacgccagagaaaacttttttcccgccttcgcgcagactagagtaaagcttaccggaaagcagctgtgccagatggttgttgagcgcgccgacattttcggaaatgctcatttcattgtcgttgagaatcaccagcatatcaggacggatatcgcccgcgtgattcatcgcttcaaacgccatgcctgcggtaatcgcgccatcgccaatgacacagacggtgcggcgatttttgccttctttttcggcagcaaccgcaataccaattccggcactgatggaggtactactatgcccgacgcttaatacgtcatattcgctttcgccgcgccacgggaacgggtgcagaccgcctttctgacggatggtgccgattttgtcgcggcgtccggtcaaaattttatgcggataagcctgatgccccacatcccaaatcaattggtcaaacggggtgttgtagacatagtgcagcgccacggtcagttcgaccgtgcccagcccggaggcgaagtgcccgctggaacggctcacgctgtcgagtaaatagcggcgcagttcgtcgcagagtttcggtaaactctctttcggcaacagtcgtaactcctgggtggagtcgaccagtgccagggtcgggtatttggcaatatcaaaactcatcaggggcctattaatacttattgtttatttattacgctggatgatgtagtccgctagcgcttccagtgcgctggtatcgagactctgttcagccagttgtttcaggctctgacgggcatcgtcgatcagatcccgggctttcttccgggcttgctcaagacccagaagtgcagggtaggtacttttaccaagttgctggtcggcaccctggcgttttcccaacgttgcagtatctcccaccacatccaggatgtcatcctgaacctggaaggcaaggccgatgctctctgcatacttgtcgagtaccggcagagcacgacgtcctttatctccggcgcttaatgcaccaaggcgaacggcggcgcgaatcaatgcgccggttttatgacgatgaatacgctcaagcgcgtccagaggtacgtgtttgccttccgcgtctaaatctaatgcctgaccaccgcacattccggcaataccactggcgctcgccagttcagaaatcatgctaattctgtcgcggtcgctcacttccggcatatcggcatcgcttaaaatgctgaacgccagcgtttgtaaagcgtcgccagcgagaatcgcgtttgcttcgccaaacttcacatggcaggttggcaaaccgcgacgcagatcgtcatcatccattgccggtaaatcatcatgaattaaactgtaagcgtggatacactcaacggcggcagcgggtgcgtccagcgtgtttgtgctaacgccgaacatatgaccggcggcataaaccaggaaaggtcgcaggcgcttaccacctaataatgcgccatactgcatggtttcgaccacgggagtgttctgaaagggcagtggggcgataaaacggctcagcgcctggttggcctgcttaacgcaggcttcgagttgctgcggaaagtccattactcattgtccggtgtaaaaggggttagagaggcgtcttcattgtcagacagcagaatttgtacgcgctgttcggcttgttgtaatttggcctgcccctgacgtgccagctgcacgccgcgttcgaactcgttcagcgcctcttccagcggcaggtcgccactttccagacgggttacaatctgttccagctcgctcagcgccttttcaaagctggcgggcgcctcatttttcttcggcataatgaatgtctgactctcaatatttttcgccccgtcatggtaacggactcagggcaaatagcaaataacgcgcaatggtaaggtgatgtgcacagcaaagcgatgttagtggtatacttccgcgcctggatgcagccgcaggtgtgggctgctgtatttttccctatacaagtcgcttaaggcttgccaacgaaccattgccgccatgaagtttatcattaaattgttcccggaaatcaccatcaaaagccaatctgtgcgcttgcgctttataaaaatccttaccgggaacattcgtaacgttttaaagcactatgatgagacgctcgctgtcgtccgccactgggataacatcgaagttcgcgcaaaagatgaaaaccagcgtctggctattcgcgacgctctgacccgtattccgggtatccaccatattctcgaagtcgaagacgtgccgtttaccgacatgcacgatattttcgagaaagcgttggttcagtatcgcgatcagctggaaggcaaaaccttctgcgtacgcgtgaagcgccgtggcaaacatgattttagcagcattgatgtggaacgttacgtcggcggcggtttaaatcagcatattgaatccgcgcgcgtgaagctgaccaatccggatgtgactgtccatctggaagtggaagacgatcgtctcctgctgattaaaggccgctacgaaggtattggcggtttcccgatcggcacccaggaagatgtgctgagcctcatttccggtggtttcgactccggtgtttccagttatatgttgatgcgtcgcggctgccgcgtgcattactgcttctttaacctcggcggcgcggcgcatgaaattggcgtgcgtcaggtggcgcattatctgtggaaccgctttggcagctcccaccgcgtgcgttttgtcgctattaatttcgaaccggtcgtcggggaaattctcgagaaaatcgacgacggtcagatgggcgttatcctcaaacgtatgatggtgcgtgccgcatctaaagtggctgaacgttacggcgtacaggcgctggtcaccggcgaagcgctcggccaggtgtccagccagacgctgaccaacctgcgcctgattgataacgtctccgacacgctgatcctgcgtccgctgatctcttacgacaaagagcacatcatcaacctggcccgccagattggcaccgaagactttgctcgcacgatgccggaatattgtggtgtgatctccaaaagcccgacggtgaaagcagttaaaagcaagattgaagcggaagaagagaagttcgacttcagcattctcgataaagtggttgaggaagcgaataacgttgatatccgcgaaatcgcccagcagaccgagcaggaagtggtggaagtggaaaccgtcaatggcttcggcccgaacgacgtgatcctcgatatccgttctatcgatgaacaggaagataagccactgaaagtcgaagggattgatgtggtttctctgccgttctataaactgagcaccaaatttggcgatctcgaccagaacaaaacctggctgctgtggtgtgagcgcggggtgatgagccgtctgcaggcgctctatctgcgcgagcagggctttaacaatgtgaaggtatatcgcccgtaatttgtggtttttacgtcgcatctggtcagatgcgacgtttgccgcatccgacattactcgtaataattataaatccctgccgccatcaccagttgacttgccacttcatgggctttttcacgcccaaccaacaggtcgataattttcagaccaaagtcgatagctgtacccggcccctggctggtcagcaattttacccgtgcatcccagacgacgcgcttgtccagccattgttcggcgggaattttgtctttcagcgtcgggaagccggtcatattaccaatcgggaagatatcgtgcggcaccagcacggtggctggcgcggcgcaaatagccgcgacgatacgcccggaacggtggaactgtttaacggtttcaaccagcagagtgctatcgcgaaaacactccgcgcctttaatgccaccaggcagcacgatcacgtcatattcgccatcagccacttcgaccagcggcgcatccgccagcagcttcacgccgcggctgcaggtaatcgccaggttaccatcgctggcgacgctggcagtggtgactttgataccgccgcgaaccagcagatcgatagtggtgacggcttcagtctcttcactaccaggggcgaggcaaaccagtgcgcttgcgctcatattcactctcctttctttttttaattaccaggggcgaggcaaaccagtgccgatgcgctcatattcactctcctttctttttaccatttcaaacaggcgggtgttttccggtacggcaatcccatgcgcgcgggcgcggcgtaagagaaaaccattgatatagtcgatttcagtgtggcgcagcgcgcggatatcctgcaacatgctgctgatattttccgctgtggcatcaatcacctgcatcacgtaatcacgcaaatcttctgcactagtatgatgcccttcgcgttcgatcaccgccgcgacttcttcgcatatctgcataatttcttgcggatgatgacgtaattcaccgttcgggcaattccagatggcagtcagtggattaatcacgcagttgactgccagcttgcgccacagctcggcgcgaatattgttatgccaggcaacgtcaggcaacacggtttgcaaaatatccgccagataactgtaatccccgtcctgttgccgtgccgggccaatatgcgtgataccgtttgccacatgaataatgacattgccgtcgcggcgggctgcatgggtggtggtgcccatcagtaatggctgctgaatgttttgcaactcttcgatggtgcccatgccgttgtgaattaacagtattggcgtagttacaggcagtgtggacgcgaggcttttgacggcatcggaaacctgccatgctttcagcgtcaccaggagcagatcgctggtggcgagaaaatcgggatcgttggcggtcaggctttcgttaaatatgctaccatctgtctcaaccagattcacgctacaataaggttgcggtacgcgcagccagccctgaacttcatgaccctgtttgcaaagtgctgtaagccataattgccctaaggcaccgcatcccaatacggtaattttcattgttcctcctcacccgcaaccactccgggtgttcaataaggctatcccttaattgtgcatgctgttgcgactatgcacaattaagggatacgtcctggtgcaggactgtcggttatttaactttgcgggtattatgcttcgcatcaaaaatgaagggagaggaaaagatgccatctttcgatattgtctctgaagttgatcttcaggaagcacgtaacgcggtcgataacgcgagccgcgaagtggagtcccgttttgacttccgtaacgttgaagccagttttgagctgaacgacgccagcaaaaccatcaaagtgttgagcgagtccgatttccaggtcaatcagttgctggatattctgcgtgccaagctgctgaagcgcggcattgaaggcagtagcctggatgtaccggagaatatcgttcatagcggtaaaacctggtttgtggaagcgaaactgaaacagggcattgagagcgcgacccagaagaaaatcgtcaagatgatcaaagacagcaaactgaaagtgcaggcgcaaattcagggcgatgaaatccgcgtaacgggcaaatctcgtgatgatttgcaggctgtcatggcgatggtacgtggtggcgatctcggtcagccgttccagttcaaaaacttccgcgattaatcgcgactatgtgcgttttgttcatgtcagatgcggcatgaacgcctgattcggcctacaaaggtttgtaattcagaaactttgtaggcctgataagcgtagcgcagcaggcaattcgccgcgttttttatgcctgacgaattgcctgttctatctcaaagcgattcgtcactttgctgtcgattttcacataagcactatgttcttcttctgcaatcaacacttctttgatgccttcagtttctagcaaacgcacttttaacgcctcgtttgcggcaatgttcgccgggatttcaatgcgcaaactgctgacatacggcggttctttcatggtactggcgactgtcagccacactgcggccagcattgcgccagcgagaaataccccctgaccgtcaaacatgccgttaatccagccgcccaggctaccgccaatcgccacgccaagaaactggctggtggagtaaacacccatcgccgtacctttgtaacctgctgggctctctttactgataagactgggcaggagggcttccatcaaattaaacgccacaaagaaaagctgcacgccgaccaccagttgccagaactgcgtttgcgcgttccacaacacaatttccgcaaccacgatcaacccgacgcagaagacaaagacttgcttcattttgcgcttaacttcagcgtagataatgaaaggcacgacgctgccaaaggcgattagcattgtcgccagatagaccttccagtgttcagccgccgggaaccctgcatcagccagttgtccgggcagggcaacaaacgtgctcatcagcaaaatatgcagacacataatgccaaagttgagtttcagcagccgcggttccgccagcactttactgaaactgcctttcaccattccggactcacgattaagtacgtgagtgctactgttgggcacaacccaaatggtcaacgcaatgccggtcgttgccagaatagcgatcatccagaacagcgcgtgcagcccaagtttgtgagtgatgatcgggccaagcaccatcgcaatggcaaaggtaatgccaaagctcacgccgataaacgccatcgctttggtgcggttttgttcgcgcgtgagatcggaaagcagcgccataacggcggcggcaattgctccagagccttgtagcgcccggcccagaataattccccagatggagtcggaaagcgcagcgataacgctaccggcggcaaacaccgccagcccaccgacaattaatggtttgcgaccaatgcggtcggaaagcaggccaaacggaatctgaaaaacggcctgagtcagaccataaataccaatggcaataccgattaatgcttcgctggcaccttgcagagccatgccgtacgtggtcagaaccggcagaaccataaacatgcccagcatgcgcaagctgaatacggtccctaaaccccaggtcgcgcgcctctcacctggcgtcattttataatcgttcattaccacctctgttttaaattcgcgactagtgtaaagcggcaaacgaatggggtaaacatgcggattttttagtaaatatttcgagagggatatgtttctaatgctaagaaaaaaggtgccgtagcacctttttaatagagaggttttgttaccacacagcagccagcagcgtatggctgtccggtaccataaaatcaacggacatcatcacgctgagggcagtgatggcgatgatagagaagccgaacagcttgcgcgcccagattctgtcatcagcaactttataaccgcgcagagccatacctaaccaccagacgctaaccgccgcggcgaccaccagatatttatacccagcgtaaccgccaagagagagcatcagcgtggcaacggcaaaggcgatgatatacagcgtgatgtgattcttcgccacgctaatgccttttaccactggcaataccggaatgtttgccgcctggtaatccttaaagcggaaaatggcgatggcataggagtgaggcatctgccacaggctgaagatagccagcaggatcgctgcgccgctatcgaactcaccggttaccgcacagtagccgatcaccggcggcgcagcgccggagaggctaccaatcaacgtgccgtagacagagtggcgtttcatgtacaggctataaacgccgacataaaccacaaagcccatcacccccagccagcaggccagcggattcgcgccaaaccacagcagcataaagccagcaatacccagcaacgtggcgtacaccaggctgacagcaggagagatcaggcctttcaccagcacccgattcttcgtcctttccatctttctgtcgatatccctgtcgatgtagttgttaaacacacaaccgctcgccacaaccagactcaccccaaccagcgtgtagataaacaggggataatcaatgctgcccttactggccagcaggaatcccccaatcacgctgatcaggttgccaaagatgatgcctggtttcgttacttgcaggtattgcttaaacatcataaccgccgctcttagtgcatcatcatgttgtagttgaggttccacataatccagatggagcctacaaccaggatagcgatgattagcacggtgaagacaaacgccgtcatgttccagccttcatcacttttggtattcatgtgcaggaagcacaccagatgcaccagaacctgtaccactgccattgccaggattgttcccagaattacggccggagaggcagctcctgtcatcaccatccagaacggaatcaccgtcagaatgatgctcaggataaagcctgtcatgtaggtttttacgctgccatgggacgcgccgctgtgatcggtagaatgactcattacatcgcccccatcagataaacaacagtgaacacacagatccaaaccacatccaggaagtgccagaacaggctcaggcacatgatgcgggtacggttagtgctggtcaggccgcgacgggcgatttgcaccatcagcaccgccatccagataagaccagaagtgacgtgcagaccgtgcgtgccgaccagcgcaaagaacgcactcaggaagccgctgcgatccggacccatgccgttaacaatcaggtgatggaattcatagatttccatcccgataaatccggcaccaaacaaccaggtcaacgccagccaggagataacctggcttttgttgtttttgtacatggcgatagccgccatgccgtaggtgatggagctgaacaacagcaagaaagtttcaaccagaacgaacggcagttcgaaaatgtccttacctgtcgggccgcctgcggtgccgttcaccagaacggcataggtagcaaacaagatagagaacagaatgcagtcgctcatcaggtagatccaaaatccgaagattttggttccgcctgcatcgtggtgcccgtgttcgtgcgcgtgggcagtcgcgtgcgtcaaagtatcagttgccatttttcagccctgccttagtaatctcatcgaaatgctggttttccagtttttcgatttctgccaccggcacgtagtaatccacgtcctcgtcgaagcttttcacgatccaggtgatgatcatgcctgcgaagccaacaatcgccagccaccagatatgccagatcatggcgaaaccgaagatggtggagaaagctgcaatgacgatacctgcaccgctgtttttcggcatatgaatttcttcatagtggtcaggctttttatacgcttcgcctttctctttcatttcccagaatgcatcacgttcgtgaacgtgcggcactacggcaaagttatagaacggaggcggggaagaggttgcccactccagcgtacggccaccccacgggtcgccagtcaggtcacggttctggtcgcggtcgcgaatagaaacgtacatctgaataacgaggcagagaatacccagcgcaatcagtactgcaccgctggctgcaatcatcagcatggtgtggaactgcgggtcaatctgctggctcaaacgacgggtcatgcccatgaagcccagcgcatacagtggcataaaggcaacgaagaagccgatgatccagaaccagaacgcgcgtttaccccaggtttcgttcagtttgaaaccgaacgctttaggccaccagtaggtcatccctgcgaagcagccgaagaccacgccgccgatgatcacgttatggaagtgcgcaatcaggaacaggctgttatgcagaacgaagtccgcgcccggtacggccagcagcacgccagtcatcccgcccacgctgaaggtgacgataaaaccgatggtccacagcatcgcagaatggaacacgatgcggccctgatacatggtgaacagccagttgaagatcttcaccccggtcgggatggcgataatcattgtggtgataccaaagaaggcgtttacgttcgcgcccgcacccatcgtaaagaagtggtgcagccaaacgatgaagctcagcacggtgatacaggcggttgcccataccaggctggtataaccaaacagacgtttacggctgaaggttgccgcaatttcggagaacacaccgaaaacaggcaggatcaggatgtaaacttccgggtggccccaggcccaaatcaggttgatgtacatcatcatgttgccacccatatcgttggtaaagaaatgggtgcccagatagcgatccagggtcaacaacgcgacggtaaccgtcagaattgggaaggaagcaataatcagtacgttcgcgcacagacttgcccaggtaaatactggcatcttgaacatggtcatgcccggtgcgcgcatcttcagaatggtaacgaagaagttgataccggtaagcgtcgtacctataccggatagctggagactccatatccagtaatcgacaccgactcccggactgtactctattccgcttagcggtggataggccagccagccggtctgcgcaaattcgcccacgccgagagaaacgttaaccagaatcacaccaacaacggtaaaccagaagcttaagttgttgaggaacgggaacgcaacgtcacgcgcgccgatctgcagcggaaccaccaggttcatcagaccgataacgaaaggcatcgccacgaagaagatcataatcacgccgtgcgcggtaaagatctgatcgtagtggtgaggtggcaggaagcccgcttcgcccgcgctggcaagagcctgctggctacgcatcataatggcgtcagcaaaaccacgcagcaacatcacaatcgccacgatgatatacatgataccgaggcgtttatggtcgacggaggtcagccactctttccacaggtaggtccacttaccgaagtaagtgatcaggccaacgagcgccagacctcccaaaataatgccagcgatcgtaaccatgacgataggttcatggaacgggactgcatcaagacttaattttccgaacatctttattcttcctcaacccctttaatgggcggattccgcgtggctcatgtccatgccttccataccttcgtgtgcgctgtgctcaccttctggctgggtcatgtccatgctcttaccgtgagccataaacttgttaattacatcggcaaacaagtctggtttcacgttggagaaatattccacctggttgtattcgctaggcgcggccagtttttcgaacgcagccatgtcagacatggtgttcgggctctgcttcgcttttgcgacccactggtcgaatgcggcgcgatccggtgttgcaatagctttgaacttcatgccactgaagcccgggccgctgtagctggcggagataccgtcataagtgccgggttcgttggcgatcagatgcaggcgagtctgcataccggccatggcataaatctggctacccagacgcggaatgaagaaggagttcatcacggagttggaggtcactttgaagtacaccggagtgttcgccgggaaagcgatttcattcacggtagcaatgccctgttccgggtagatgaagaaccatttccagtccatggaaaccacttcgatggtaatgggcttctcgtcgtgtgccagcggcttgctaggctcaagagcgtgagtggttttccaggtcagtactgcaaggaagatgatgattaagataggtaccgtccagaccacagcttccactttattggagtgactccagttcgggctgtacttagcatctttattgctcgcacggtacttccaggcgaaaccaacagccatcaagattgcgggaataacgacaatcaacatcaggccaaatgccgtcagtatcagactacgttgctccagaccaatctgtcctttgggatctaacagcgcagaattacagccactgagcaatacagtgcctgcaaataaactcaaccatcccaaacttttattgtatttcctgagtctcatttaacgacctcaattccacgggatctggtggcgtttaaagtgtgtgggcattttacgggaaggttacattactgtaaacatgattaaattcctgttacttggatttggctgccaggtcacatatgttgcaaaacatatcaggttgattttaagaagctgttgcaaaagggcgttataacaaaaggggagtgctgaaggagtctgggcgggcaattggtataaccaatgtgaaataaaacaattatttaacaaataattatcattagagtgacaactgggtgatgagaaaataaagactcattagctgaatcgtgtaagaaaaatagaatttataaatggcgccaataatttccaaacgctaagccgcacaaaagaacaaatattaataagcgatactgatgtttatttagccgtaataattacggcgagtgattactacagctaaataatatttacagattacgtcagatgcgtttttcgtagcgccagataatccagcaaaccaccaagcacgacgccagaaagggcgactaaaaccccgacttccagcagagcaggcaggaaagagaagtgcgtcaaatccagcgcgtccatcgtcaatagcagtaaccacacggccaacaggctgacgcccgccgccagtgtccacatggcaaaggcataacctgccggatatgcggtacgggagataaagttgtcatttactcgtgtatattcaagcgtctggcggcaaaccagcagcaaaataagccctggtacggcagcggcgacggagaatagatagaatgtgctccagccgtgtgcttcaacaaaccaacccgccacggggccgacataaactcgccctacagcagaaagcgcactgagcagggcaaattgagtagcggaaaaactcttattacatagcgtcattaacagcgcgacaaaggcacttgtgcccatcccgccacagaggttttcgaaaaagacggctgcgcccatgctgtagagatgcttatcagtaatgctcagcagccagtaaccggcgttagacgcaccttgtaaaatgccgaaaatcagcagtgcccggaacagactcaggcgctgcatcaaaatcccaccgtacaatgcgccaacaatggtcgctagtaagccaagcgttttgttaaccacgcctacttcacccgcatcaaacccgacgccgcgaatcaaaaacgtggttgtcaggctcatggcgaatgcgtcgcccagcttatacagcacgataagaagcaaaataagccaggcattattgcgaccaaagaaatctcgcagaggtgcaacaaccgcttgttccagcgttttgggcacaggaatggtgtcggttggttctggtgcaagcaacgtcgcgataatacaggggatcaacagtgccgccattaaccagtacatgccctgccagcccagccatttatctgccagccacagggctaggccgccggaaaccagcatccctaaacggtaacccagcacgctgattgccgcgcccgcaccacgttcttctgccggaagcacatcggttttccacgcatcgaagactatatcctgggaagcagagcaaaaagcgatcaccactgccagcgccgccatccagcggagttgggtgcctggttcgagaaaacccatcgccgcaatggcgactaataacaggatttgcgtggcgagcagccaaccgcgccgccgcccaaaaaatggaggcgtgtagcggtccatcagcggactccagaggaatttaaaaacgtaagcctggcctaccagagagaagaaaccaatggttttgagatcgatattctcgaccgtcatccaggcctgtaaggtaccggatgtcagggcgagcggtagcccggaagcaaaacccaggatcagcaatatggcactacgcggctgttgaaaaatacgtaaatattgactggacatgggcgtctacaggcccggcttgcaccgggccagagggcagaaattaacgcgcgttctgcttgatgaattcgtggatgctggtgtcctgagacatatcagcgatggtatcggtcagcacactgttaaccgcatcggcgatatttttgttggaggcctggaacgcaccttcaacgttgtagctggcacgatagtttttggtcattttgttgccattctgcgcggtagcgatgatggcgatatccgctttggtcgcgatgttgtagcgcacgttgccctgggacacgtcagcatacagttggctaacgatgatttgcagattaaccgggccattcggaccaaccatgtaaccacgcgcggtcatctgtttttccagcacttcttgcagcaggaaacgcagatcgcgggaggcggtcagggtaacgatttgattatcgcgggtgacttttgccagcgcctgatcggtacgctgatcggcaccattaatgcttacggtgacgcccatcaggcttggatcctgctgtggcagtgtaatcgtcggggaaacttcaatagttgttggcggttttgcgcatcctgcaagcataaacagagcaactaacgggaagaggatttttttgaacatgttcgggctctcagagactcttaagcgtgtttggtaaaaattcccgccatcataacattgccaacggcgaggggaagtgggtaaggcatgtaaattcatcatgttgacgaaataatcgcccctggtaaaagaaacactgatgcgaggcctgtgtttcaatctttaaatcagtaaacttcatacgcttgacggaaaaaccaggacgaaacctaaatatttgttgttaagctgcaatggaaacggtaaaagcggctagtatttaaagggatggatgacatctcagcgttgtcggaggagatatttcatgatgatacgtgagcggatagaagaaaaattaagggcggcgttccaacccgtattcctcgaagtagtggatgaaagctatcgtcacaatgtcccagccggctctgaaagccattttaaagttgtgctggtcagcgatcgttttacgggtgaacgttttctgaatcgtcatcgaatgatttacagtactttagcggaggaactctctactaccgttcatgcgctggctctgcatacttacactattaaggagtgggaagggttgcaggacaccgtctttgcctctcctccctgtcgtggagcaggaagcatcgcgtaaaaacgcatttgcaactgtcggcgcttttccagtatgttgctaaagattttatgaaaaacggcctgcgggccgttttgttttgtctggattttgcgctttttgcccagcattcagacgaaaattgcccgggaattgtgaaaaaatacgcgacagcgcgcaataaccgttctcgactcataaaagtgatgccgctataatgccgcgtcctatttgaatgctttcgggatgattctggtaacagggaatgtgattgattataagaacatcccggttccgcgaagccaacaacctgtgcttgcggggtaagagttgaccgagcactgtgattttttgaggtaacaagatgcaagttagtgttgaaaccactcaaggccttggccgccgtgtaacgattactatcgctgctgacagcatcgagaccgctgttaaaagcgagctggtcaacgttgcgaaaaaagtacgtattgacggcttccgcaaaggcaaagtgccaatgaatatcgttgctcagcgttatggcgcgtctgtacgccaggacgttctgggtgacctgatgagccgtaacttcattgacgccatcattaaagaaaaaatcaatccggctggcgcaccgacttatgttccgggcgaatacaagctgggtgaagacttcacttactctgtagagtttgaagtttatccggaagttgaactgcagggtctggaagcgatcgaagttgaaaaaccgatcgttgaagtgaccgacgctgacgttgacggcatgctggatactctgcgtaaacagcaggcgacctggaaagaaaaagacggcgctgttgaagcagaagaccgcgtaaccatcgacttcaccggttctgtagacggcgaagagttcgaaggcggtaaagcgtctgatttcgtactggcgatgggccagggtcgtatgatcccgggctttgaagacggtatcaaaggccacaaagctggcgaagagttcaccatcgacgtgaccttcccggaagaataccacgcagaaaacctgaaaggtaaagcagcgaaattcgctatcaacctgaagaaagttgaagagcgtgaactgccggaactgactgcagaattcatcaaacgtttcggcgttgaagatggttccgtagaaggtctgcgcgctgaagtgcgtaaaaacatggagcgcgagctgaagagcgccatccgtaaccgcgttaagtctcaggcgatcgaaggtctggtaaaagctaacgacatcgacgtaccggctgcgctgatcgacagcgaaatcgacgttctgcgtcgccaggctgcacagcgtttcggtggcaacgaaaaacaagctctggaactgccgcgcgaactgttcgaagaacaggctaaacgccgcgtagttgttggcctgctgctgggcgaagttatccgcaccaacgagctgaaagctgacgaagagcgcgtgaaaggcctgatcgaagagatggcttctgcgtacgaagatccgaaagaagttatcgagttctacagcaaaaacaaagaactgatggacaacatgcgcaatgttgccctggaagaacaggctgttgaagctgtactggcgaaagcgaaagtgactgaaaaagaaaccactttcaacgagctgatgaaccagcaggcgtaatttacgcagcataacgcgctaaattcgcacaaaggcccgtcaccgccaggtggtgggcttttttttgtcatgaattttgcatggaaccgtgcgaaaagcctctttcggtgttagcgtaacaacaaaagattgttatgcttgaaatatggtgatgccgtacccataacacagggactagctgataatccgtccataaggttacaatcggtacagcaggttttttcaattttatccaggagacggaaatgagttacagcggcgaacgagataactttgcaccccatatggcgctggtgccgatggtcattgaacagaccagtcgcggtgagcgctcttttgatatctattctcgtctacttaaggaacgcgtcatttttctgactggccaggttgaagaccacatggctaacctgattgtggcgcagatgctgttcctggaagcggaaaacccagaaaaagatatctatctgtacattaactccccaggcggggtgatcactgccgggatgtctatctatgacaccatgcagtttatcaagcctgatgtcagcaccatctgtatgggccaggcggccagcatgggcgctttcttgctgaccgcaggggcaaaaggtaaacgtttttgcctgccgaatagccgcgtgatgattcaccaaccgttgggcggctaccagggccaggcgaccgatatcgaaattcatgcccgtgaaattctgaaagttaaagggcgcatgaatgaacttatggcgcttcatacgggtcaaagtttagaacagattgaacgtgataccgagcgcgatcgcttcctttccgcccctgaagcggtggaatacggtctggtcgatagcattctgacccatcgtaattgatgccagaggcgcaactgtgccgctatacttatccagggcggcacaacgctgtaagcggcttgcgcctgagaatggcatttgcgtcgtcgtgtgcggcacaaagaacaaagaagaggttttgacccatgacagataaacgcaaagatggcagtggcaaattgctgtattgctctttttgcggcaaaagccagcatgaagtgcgcaagctgattgccggtccatccgtgtatatctgcgacgaatgtgttgatttatgtaacgacatcattcgcgaagagattaaagaagttgcaccgcatcgtgaacgcagtgcgctaccgacgccgcatgaaattcgcaaccacctggacgattacgttatcggccaggaacaggcgaaaaaagtgctggcggtcgcggtatacaaccattacaaacgtctgcgcaacggcgataccagcaatggcgtcgagttgggcaaaagtaacattctgctgatcggtccgaccggttccggtaaaacgctgctggctgaaacgctggcgcgcctgctggatgttccgttcaccatggccgacgcgactacactgaccgaagccggttatgtgggtgaagacgttgaaaacatcattcagaagctgttgcagaaatgcgactacgatgtccagaaagcacagcgtggtattgtctacatcgatgaaatcgacaagatttctcgtaagagtgacaacccgtccattacccgagacgtttccggtgaaggcgtacagcaggcactgttgaaactgatcgaaggtacggtagctgctgttccaccgcaaggtgggcgtaaacatccgcagcaggaattcttgcaggttgatacctctaagatcctgtttatttgtggcggtgcgtttgccggtctggataaagtgatttcccaccgtgtagaaaccggctccggcattggttttggcgcgacggtaaaagcgaagtccgacaaagcaagcgaaggcgagctgctggcgcaggttgaaccggaagatctgatcaagtttggtcttatccctgagtttattggtcgtctgccggttgtcgcaacgttgaatgaactgagcgaagaagctctgattcagatcctcaaagagccgaaaaacgccctgaccaagcagtatcaggcgctgtttaatctggaaggcgtggatctggaattccgtgacgaggcgctggatgctatcgctaagaaagcgatggcgcgtaaaaccggtgcccgtggcctgcgttccatcgtagaagccgcactgctcgataccatgtacgatctgccgtccatggaagacgtcgaaaaagtggttatcgacgagagcgtaattgatggtcaaagcaaaccgttgctgatttatggcaagccggaagcgcaacaggcatctggtgaataattaaccattcccatacaattagttaaccaaaaaggggggattttatctcccctttaatttttcctctattctcggcgttgaatgtgggggaaacatccccatatactgacgtacatgttaatagatggcgtgaagcacagtcgtgtcatctgattacctggcggaaattaaactaagagagagctctatgaatcctgagcgttctgaacgcattgaaatccccgtattgccgctgcgcgatgtggtggtttatccgcacatggtcatccccttatttgtcgggcgggaaaaatctatccgttgtctggaagcggcgatggaccatgataaaaaaattatgctggtcgcgcagaaagaagctagtacggatgagccgggtgtaaacgatcttttcaccgtcgggaccgtggcctctatattgcagatgctgaaactgcctgacggcaccgtcaaagtgctggtcgaggggttacagcgcgcgcgtatttctgcgctctctgacaatggcgaacacttttctgcgaaggcggagtatctggagagcccgaccattgatgagcgggaacaggaagtgctggtgcgtactgcaatcagccagttcgaaggctacatcaagctgaacaaaaaaatcccaccagaagtgctgacgagcctgaatagcatcgacgatccggcgcgtctggcggataccattgctgcacatatgccgctgaaactggctgacaaacagtctgttctggagatgtccgacgttaacgaacgtctggaatatctgatggcaatgatggaaagcgaaatcgatctgctgcaggttgagaaacgcattcgcaaccgcgttaaaaagcagatggagaaatcccagcgtgagtactatctgaacgagcaaatgaaagctattcagaaagaactcggtgaaatggacgacgcgccggacgaaaacgaagccctgaagcgcaaaatcgacgcggcgaagatgccgaaagaggcaaaagagaaagcggaagcagagttgcagaagctgaaaatgatgtctccgatgagcgcagaagcgaccgtagtgcgtggttatatcgactggatggtacaggtgccgtggaatgcgcgtagcaaggtcaaaaaagacctgcgtcaggcgcaggaaatccttgataccgaccattatggtctggagcgcgtgaaagatcgaatccttgagtatcttgcggttcaaagccgtgtcaacaaaatcaagggaccgatcctctgcctggtagggccgccgggggtaggtaaaacctctcttggtcagtccattgccaaagccaccgggcgtaaatatgtccgtatggcgctgggcggcgtgcgtgatgaagcggaaatccgtggtcaccgccgtacttacatcggttctatgccgggtaaactgatccagaaaatggcgaaagtgggcgtgaaaaacccgctgttcctgctcgatgagatcgacaaaatgtcttctgacatgcgtggcgatccggcctctgcactgcttgaagtgctggaaccagagcagaacgtagcgttcagcgaccactacctggaagtggattacgatctcagcgacgtgatgtttgtcgcgacgagcaactccatgaacattccggcaccgctgctggatcgtatggaagtgattcgcctctccggttataccgaagatgaaaaactgaacatcgccaaacgtcacctgctgccgaagcagattgaacgtaatgcactgaaaaaaggtgagctgaccgtcgacgatagcgccattatcggcattattcgttactacacccgtgaggcgggcgtgcgtggtctggagcgtgaaatctccaaactgtgtcgcaaagcggttaagcagttactgctcgataagagtttaaaacatatcgaaattaacggcgataacctgcatgactatctcggtgttcagcgtttcgactatggtcgcgcggataacgaaaaccgtgtcggtcaggtaaccggtctggcgtggacggaagtgggcggtgacttgctgaccattgaaaccgcatgtgttccgggtaaaggcaaactgacctataccggtagcctcggcgaagtgatgcaggagtccattcaggcggcgttaacggtggttcgtgcgcgtgcggaaaaactggggatcaaccctgatttttacgaaaaacgtgacatccacgtccacgtaccggaaggtgcgacgccgaaagatggtccgagtgccggtattgctatgtgcaccgcgctggtttcttgcctgaccggtaacccggttcgtgccgatgtggcaatgaccggtgagatcactctgcgtggtcaggtactgccgatcggtggtttgaaagaaaaactcctggcagcgcatcgcggcgggattaaaacagtgctaattccgttcgaaaataaacgcgatctggaagagattcctgacaacgtaattgccgatctggacattcatcctgtgaagcgcattgaggaagttctgactctggcgctgcaaaatgaaccgtctggtatgcaggttgtgactgcaaaataatgacctcgcgcaaaatgcactaataaaaacagggctggcaggctaattcgggcttgccagcctttttttgtctcgctaagttagatggcggatcgggcttgcccttattaaggggtgttgtaaggggatggctggcctgatataactgctgcgcgttcgtaccttgaaggattcaagtgcgatataaattataaagaggaagagaagagtgaataaatctcaattgatcgacaagattgctgcaggggctgatatctctaaagctgcggctggccgtgcgttagatgctattattgcttccgtaactgaatctctgaaagaaggggatgatgtagcactggtaggttttggtacttttgccgttaaagagcgtgctgcccgtactggccgcaacccgcagaccggtaaagagatcaccatcgctgctgctaaagtaccgagcttccgtgcaggtaaagcactgaaagacgcggtaaactaagcgttgtccccagtggggatgtgacgaagttcaagggcgcatctactgatgtgccttttttatttgtattcggtgactttctgcgtcttgtgggctgacaattgcccccgtttcttgtcacaataggcctttgcgcgcatcgatacgttgcgtgaggtacacagtcatctacagcggagtgttgttacaccatgatggacagcttacgcacggctgcaaacagtctcgtgctcaagattattttcggtatcattatcgtgagcttcatattgaccggcgtgagtggttacctgattggcggaggcaataactacgccgcaaaagtgaatgaccaggaaatcagccgtgggcaattcgagaacgccttcaacagcgagcgtaatcgcatgcagcaacagctgggcgatcaatactccgagctggcagcgaacgaaggctatatgaaaaccctgcgtcaacaggtgctgaatcgtctgatcgacgaggcgctgctggatcagtacgcacgtgagctgaaactgggtatcagcgatgagcaggttaaacaggcgattttcgcgaccccagccttccaggttgacggcaaatttgataacagccgctataacggtatcctcaaccagatggggatgaccgccgatcagtacgcccaggcgctgcgtaaccagctcactacccaacagctgattaacggcgttgccggtaccgattttatgctgaaaggtgaaaccgacgagctggcggcactggtcgcgcaacaacgcgtggtgcgtgaggcgactatcgatgttaacgcgctggcggcgaagcagcctgtgaccgaacaggagattgccagctactacgaacaaaacaaaaacaatttcatgacgccggaacaattccgcgtgagttacatcaagctggatgccgcaacgatgcagcaaccggttagcgatgcggatatccagagctactacgaccagcatcaggatcaattcacccagccgcagcgtacccgctacagcatcatccagaccaaaactgaagatgaagcgaaagcggtacttgatgagctgaataaaggcggtgattttgctgcattagccaaagaaaaatctgccgatattatctctgctcgtaacggcggcgatatgggttggttagaagatgccactatcccggacgaactgaaaaatgctggtctgaaagaaaaaggccaactgtctggtgtcatcaaatctagcgtcggtttcctgattgtacgtctggacgacattcagccagcgaaagtgaaaagcttagacgaagtacgtgacgacattgcggcgaaagtgaaacacgaaaaagccctcgatgcgtactacgcgctgcagcagaaagtgagcgatgcggcaagcaacgacaccgagtctctggccggtgcagagcaagctgccggcgttaaagccactcagacgggttggttcagcaaagataacctgccggaagagttgaacttcaagccggttgccgacgctatctttaacggcggtctggtaggtgaaaacggcgcgccgggcatcaactctgacatcatcaccgtagacggcgaccgcgcattcgtgctgcgcatcagcgagcacaaaccggaagcggtgaaaccgttggcagatgttcaggaacaagttaaggcattggttcagcacaacaaagctgaacaacaggcgaaagtggatgctgagaaactgctggttgatttgaaagccggcaaaggtgcggaagctatgcaggctgccggtctgaaatttggcgagccgaaaaccttaagccgttccggtcgtgacccgattagccaggcggcgtttgcactgccactgccagcgaaagacaaaccgagctacggtatggcgaccgatatgcaaggtaatgtggttctgctggcgctggatgaagtgaaacaaggtagtatgccggaagatcagaaaaaagcgatggtgcagggtatcacccagaacaacgcacaaatcgtctttgaagctctgatgagtaacctgcgtaaagaggcgaaaatcaaaattggcgatgcgctggaacagcaataatcctgaagccgcctcgcaaaaaaatgcgttgcagctgtaacaagaaaaggtcgctttcgcggccttttccatttctgaacattgccatttgtttactgttttcactgccgttaaggtgattccactgttaacaaacaaggagaaaacagtatgaaacacggaattaaagcactgctcattaccctgcccctggcctgtgccggaatgtctcatagcgcgctggcggcagcttctgtggcgaaaccgacggcggtagaaaccaaagcggaagctcctgcagcacaaagtaaagcagcagtaccggcgaaagccagtgacgaagaaggcacccgggtcagcattaataatgccagcgcggaagagctagcccgcgcgatgaatggcgttggcctgaagaaagcgcaggcgattgtcagttatcgcgaagagtacggtccgtttaaaactgtggaggatctaaagcaggtgccggggatgggcaatagcctggtggaacgtaatctggcggtattaaccctgtaattaatttgcatagtggcaattttttgccagactgaagaggtcataccagttatgacctctgtacttataacaacaacgtaaggttattgcgctatgcaaacacaaatcaaagttcgtggatatcatctcgacgtttaccagcacgtcaacaacgcccgctaccttgaatttctcgaagaagcccgctgggatgggttggaaaatagcgacagttttcagtggatgacggcccataacatcgccttcgtcgtggtcaatatcaatattaactatcgtcgcccagcggtattaagtgacctgttaactattaccagtcagttgcagcaattaaacggtaaaagcggcatcttaagccaggtcattacactggagccggaagggcaggtggtagcggatgcgcttattacgtttgtttgtattgatcttaaaacgcagaaagcattagctctggaaggggaattgcgcgaaaagctggagcagatggttaagtaaacgttttgtggtgccggatgctcaagccgcatccggcgacacccggaataattacctcaacccggttttctgcttcatcgctgccatcaccgtcggtttatcggccagataatgattcaaaccgttggcgcgtaaattacatgccgcacaatgaccgcaaccgtcgcctttaaagccgttatagcaggtcaacgtttcgttacggactaaatccagtttgccgtaataatctgccagcgcccaggtttccgctttatcaatccacatcagcggcgtttcaaaacgaatatctttcgccatgcccaaactgacggcatggtttagtgctttcacaaactcatcgcggcaatccgggtagccggagaaatccgtttcgcagacgccagtaattacggcttctgcttttacctgatacgcatatattgccgccagcgtcaggaacaaaatattacgccctgggacaaacgtattcgggataccatcggcttcaggttcataatcaggcaccggaatgctgtcacgcgtcaggctactgaccgccagctcgttgagcagggtgacatccagcaccttatgcgcgcgtgcccccagtttcagcgccagttcgcgtgccacgtcgatttctgcgcgatgccgctgaccgtaatcgaacgtcacgcaatggacttcatcatattgttgtaatgcctgcaccagacaggtggtggaatcctgacctccactgaacacaacgacagcacgtttcatagataatcctgcttgaacaataaaagcgttatggtaacgcctgcgattaacccggaccagctattcattggcttggcgcgggaagccaggcttcggtaaattcaaaccagccgcgcggtgtcagtcgcacaccgttcacgccgggaggggcactaatgcgatagtgatagttgaacagcggcgtcagcgtcgcatctgtcattaactggctaaaaaccgctttcagggcattaaatcggttttcttcatcaggcattatttgcacggcatccagtgtgctttgtagatgtgcgtatgctggagcgtcgaaaacatgtggccacagcggatcgcagcgcagccattgctccagagtatattccggtgcttcgccaattaatctgtcgcccatcatgaggtctgcgtgtgcctgtagggtcgtgtcgtcccagttttttgcgttatgaaaaataattgtgagttcacagccttccgctgccagtgtcgcctgtaggcgttctgccatggtatgaagttctatcggtaggtgataaaccagcgtcaaggttttcggtagtttgacttcatccggtacctgccaatgcggaatagtccagcctggcagtaatgcatgactggcggtgatcaggttttctccgacttctaacgtttgtaataaaccggattgatgaataatggagatcacttttcgcgcctgccagagggagagtcggggacttttgcgcaacgtcaaatagcaaaaacctaaactgatgccgctactgacctggctgacccgttgcagctcctccggtttgccgatggtgatttgcacgggatgccgacaactggttcccaaatctttttcgaaaagcggcggagttatccagtactcaaccgctttaagcagcggatgacgtaaatggtaataatcatggctttccaggcgcaccagctctgctgtgaattgtgttaagcgaaaaggacccgtgccgatcagtgggaattgcggatgcgccagatggctgcaatagctcgccagccggtgcgcaagccagtaatcagggcgatgtaaaaagaaggtcagacactgcggatgggtgacttcaatacgcttcacgctaataaataattgatccagtgctggcagttgtaacagcatcaataatcgctggtgtaagtgactggcttttactgcatcgccgttatgccagtgtagggtactacgaagataaaagtcccagcgtaacccgtcagtagaggtttcccagtgatgcgctaaatcgccaatcgggcgctgagtattattatcgaagcgggtcaggccggaaaatatctgcccggcgagatgctgctcggcacggccgggcaaaaagcctggttgtagcggttcgagcgggcgatagtagggaatacgcaacgtgggtgtatcgttttgccattgtccgcccataaacggctgtaacagagtgcgcagctcacctggggccagttgcgccagctccagcacatcttgctgctttccggtttccagtgcctgttccatcatcgcattgcgtaggctttccggcgtgaccagaaagcgtaattgtccgcgctttccgcgtccactctgcgcctgccactccagccatcccgcctcctgtgcctgacgcaacagcgtacgaacatggcgttcgctgcaaaaacagcgttcggccagttcgctgacggtgacggtttgcggctttccggcggaaggttgccacagacgttgatactggttaagacggttgagcaatcgcatataaacccggaacaatattatttaactattcactattacttccgtatatatcaggtgatactcaatcaccattaaccgtgtcacagagtggagaaagaaatggctcgtctggcagcatttgatatggatggcactttattgatgcccgaccatcatttaggtgagaaaaccctctctactttggcgcgactgcgtgaacgcgacattaccctcacttttgccacggggcgtcatgcgctggagatgcagcatattctcggggcgctaagcctggatgcgtatttgattaccggcaacggaacgcgcgtgcattctctggaaggtgaacttttacatcgtgatgatttacctgcggatgtcgcggagctggtgctgtatcagcaatgggatacccgagccagcatgcatatcttcaatgacgacggttggtttaccgggaaagagatccctgcgttgttgcaggcatttgtctatagcggttttcgttatcagataatcgatgtcaaaaaaatgccactcggcagcgtcaccaagatctgcttctgtggcgatcacgacgatcttacacgcttgcagatccagctatacgaagcattaggcgagcgtgcacatttgtgtttttccgccacggattgcctcgaagtgctgccggtgggctgcaataaaggcgctgcattgacggtgctgacccaacatttaggtttaagcttgcgcgattgcatggcctttggtgatgcgatgaacgatcgcgaaatgttagtcagcgtcggtagcggatttattatgggcaatgcgatgccgcaactgcgcgcggagctcccgcatttaccggtgattggacattgccgaaatcaggctgtctctcactatttgacgcactggctggactatccacatctaccttattcccccgaataacgagatcccttccagcaccgggcaattgcccggttttttttgcgttgaatttgtcattttgtgccgtggtgtttaaaccgcacagaataaattgtcgtgatttcacctttaaaataaaattaaaagagaaaaaaattctctgtggaagggctatgttagataaaattgaccgtaagctgctggccttactgcagcaggattgcaccctctctttgcaggcactggctgaagccgttaatctgacaaccaccccttgctggaagcgcctgaaacggctggaggacgacggtatccttatcggcaaagtcgccctgctggatccggaaaaaataggcctcggcctgaccgcttttgtgctgataaaaacgcaacatcacagcagcgaatggtattgccgctttgtcacggtggttaccgaaatgccagaagtgctggggttctggcgcatggctggtgaatacgattatctgatgcgcgtccaggttgccgacatgaaacgctacgacgagttttataagcgtctggtaaacagcgtgccggggctgagcgacgtcacttccagcttcgcgatggaacagattaaatacaccacttctttacccatcgaataaatatccagaatcaggtcaggacacaacgcgtgcgattatttgctcaattaagctggtatttccgtcgggaatggcgtcgctatctcggggctgtcgccttgcttgtcattatcgcgatgctgcaactggttccgccaaaagtggttggtattgttgtcgatggcgtgacagaacaacactttactaccgggcagatcctgatgtggatcgccaccatggtgctgattgccgttgtggtttatctcctgcgttacgtctggcgggtattgctgtttggtgcgtcttatcaactggctgttgaactgcgtgaagattattaccgtcagctaagccggcagcatcctgagttttacctgcgtcatcgcaccggtgacctcatggctcgtgcgaccaatgacgtcgatcgcgtcgtgtttgccgccggagaaggggtgctgacgctggtggatagtctggtgatgggctgcgctgtgttgattatgatgtctacgcaaattagctggcagttgaccttattttccctgttgccgatgccagtgatggcgatcatgattaagcgcaacggcgatgctttgcatgaacgctttaagctggcacaggcggcgttttccagtcttaatgaccgcacccaggaaagcctcaccagtatccgcatgatcaaagcctttggtctggaagatcgccagagcgcgttatttgccgcggatgccgaagataccggcaaaaaaaacatgcgggtggcgcgtattgatgctcgtttcgacccgaccatctatatcgcgattggtatggcgaacttgctggcgattggcggcggtagttggatggtggtgcagggcagtttaacgctgggccagctcaccagttttatgatgtatttaggtctgatgatttggccaatgctggcgctggcatggatgtttaacattgtggaacgtggtagtgctgcgtacagccgtattcgcgcgatgctggcggaagcgccggtggtgaacgatggtagcgaacccgtgccggaagggcgtggcgaactggatgtaaatattcaccagttcacgtatccgcagactgaccatcctgcgctggaaaacgtcaatttcgccctgaaacccggtcagatgctgggtatctgcgggccgactggttccggcaaaagtaccctgttgagcctcattcagcgtcatttcgacgtcagcgagggggatattcgctttcatgatattcctctgacgaagttacaactcgatagctggcgtagccgcctggcggtagttagccagacgccattccttttttctgacactgtggcgaataacatcgcgctgggttgcccgaatgccacccagcaagagattgagcatgtcgcgcggttagccagcgtacatgacgatattttgcgtctaccgcaaggttacgatacagaggtgggcgagcgcggtgtgatgctttccggcgggcaaaaacagcgtatctccattgctcgtgcgttattagtcaacgcggaaatcctcatccttgatgatgcgcttagcgcggtggacggacgcactgagcaccagatcctgcataacctgcgtcagtgggggcagggaagaacggtaatcatcagtgcccatcgcctttctgcactgacggaagccagtgaaattattgtgatgcagcacggacatatcgcccagcgtggcaatcatgatgtgctggcacaacaaagcggctggtatcgcgatatgtatcgctatcaacaactggaggcggcgctcgacgacgctccggaaaatcgcgaggaggccgtcgatgcgtaactaaaaatcgcgaggaggccgtcgatgcgtagttttagccaactgtggccgactctcaagcgcctgttagcgtacggtagcccgtggcgtaaaccgctggggattgcggtcctgatgatgtgggttgcggcggcggcagaagtcagtgggccgctgcttatcagctattttatcgacaatatggtagcgaaaaataacctgccgttgaaagtggttgcagggctggctgcggcgtatgttgggctgcaactgtttgccgccgggctacattacgcgcagagcctgctgtttaatcgggcggcagtaggcgtagtgcaacagttgcgtaccgacgtgatggatgctgcgttacgccagccattaagcgagtttgatacccaacccgtcgggcaggtgatttcccgcgtcactaatgacactgaagtgatccgcgatctctacgttaccgtagtggcaactgtcctgcgcagtgccgcgctggtgggcgcgatgctggtggcgatgttcagcctcgactggcgaatggcactggtggcgataatgattttcccggtggtgctggtggtaatggtgatataccagcgttacagcacgccgattgtccgtcgtgtgcgcgcctatttggcggatatcaacgacggctttaacgaaatcatcaatggcatgagcgttatccagcagtttcgtcagcaggcgcgatttggcgaacgtatgggggaggccagtcgtagtcactatatggcgaggatgcaaaccctgcgcctcgacggttttctgctgcgtccgctgctgagtctgtttagtagcctcattctttgtggcttgttgatgctgtttggcttctccgccagcggcaccattgaagtgggcgtgctgtatgcgtttatcagctatcttgggcgacttaacgaaccattaatcgaactgaccacgcaacaggcgatgctgcaacaggctgttgttgctggtgagcgcgtgtttgaactgatggacggaccgcgccagcaatatggcaatgatgatcgcccgttacagagtggcaccatcgaagtcgataacgtgagttttgcttatcgcgatgacaatctggtgctaaagaacattaatctctctgtgcctagccgcaattttgtggcgctggtcgggcataccggcagtggcaaaagcaccctcgccagtttattgatgggctattacccgctaacggaaggtgagattcgccttgatggtcgtccattaagtagcctaagtcacagcgcgctgcgccagggcgtggcaatggtgcagcaagatccggtggtgctggcggataccttcctcgccaacgtgacgctggggcgggatatctccgaagaacgcgtctggcaggcgctggaaaccgtgcaactggcggagctggcgcgtagcatgagcgacggtatttacacgccgctgggcgagcaggggaataatctcagtgttgggcaaaagcaactgctggcactggcgcgcgtgctggtcgagacgccgcaaatcctgatccttgatgaggcaaccgccagcattgactccggtactgaacaggcgattcaacatgctctggcggcggtgcgtgaacataccacgctggtagtgattgctcaccgcttaagcaccattgttgatgccgacaccattctggtgcttcatcgtgggcaagccgtggagcagggcactcaccagcaactgctggcggcccagggacgctactggcagatgtatcaactgcaacttgcgggcgaagagctggcagccagcgtgcgtgaagaggaaagtttgagcgcctgaatagcgcaatatttcatcgttggtgcaaaaatgtaacgcactgtgcactgtcatagtgcgttttcattttcaaacttcttaacttcctgctctctttctcgtttttcatttctggcacaccgcttgcaataccttcttcgtgtagcagaaccattaccgaattctgaccggaggggatctatgaagctggtgaccgtgataatcaaaccattcaagctggaagacgttcgtgaagcgttatcttccattggtattcagggcctgaccgtcaccgaagtgaaaggtttcgggcgtcagaaagggcatgccgagctgtaccggggggcggaatacagcgtcaatttcctgccaaaagtaaaaattgatgtggcgattgctgatgaccaactcgatgaagtgatcgatatcgtcagtaaggcggcttacaccggaaaaattggcgacggcaaaatcttcgtcgctgaattgcaacgcgtcattcgtattcgtaccggcgaagccgacgaagcggcgctgtaatctctggcacacagcaacaggaacgaaaaatgaagatagcgacgataaaaactgggcttgctagtctggcgatgcttccgggactggtaatggctgcacctgcggtggccgataaagccgacaatgcgtttatgatgatttgtactgcgctggtgctgtttatgactattccggggattgccctgttttacggtgggttgattcgcggcaaaaacgtgctgagcatgctgacgcaggtgacggtgacatttgcactggtctgtattctctgggtggtttacggttacagcctggcgtttggtgagggcaacaacttcttcggcaacattaactggttgatgctgaaaaacatcgaactgacggcggtgatgggcagcatttatcagtatatccacgtggcgtttcagggaagctttgcctgcattaccgtcggcttgatagttggggcgctggcggaacgaatccgcttcagtgctgtgttgattttcgtggtggtatggctgacgctctcttacattccgattgcgcatatggtgtggggcggtggtttgctggcttctcacggtgcgctggatttcgcgggtggcaccgtggtgcacattaacgccgcaatcgccggtctggtgggcgcgtatctgataggaaaacgcgtgggcttcggtaaagaggcgtttaaaccgcacaacctgccgatggtcttcaccgggactgccattctctatatcggttggtttggctttaacgccgggagtgcgggcacggcgaatgaaatcgcggcactggcatttgtgaatactgtggtcgcaacggcggcggcaattcttggctggatcttcggtgaatgggcgctgcgtggtaagcctagtctgctgggggcgtgttctggcgcgattgccggtctggtcggcgtgacgccagcctgcggctacattggggttggcggcgcgttgattatcggcgtggtagctggtctggcgggcttgtggggcgttaccatgctcaaacgcttgctgcgggtggatgatccctgcgatgtcttcggtgtgcacggcgtttgtggcattgtcggctgtatcatgaccgggatttttgccgccagcagcctgggcggcgtgggcttcgctgaaggtgtgacgatgggccatcagttgctggtacagctggaaagcatcgccattacgatcgtctggtccggtgttgtggcatttatcggctacaaattggcggatctgacggttggtctgcgtgtaccggaagagcaggagcgagaagggctggatgtcaacagccacggcgagaatgcctataacgcgtaacaagcactgcaaaaaacagccggacggttttcacctccggctatttttttaattgtgattacgcatcaccccttcctgaacggtgctggcaaccagtacgccgtcttgggtataaaactcaccgcgcacaaagccacgtgcgctggacgcgctggtgctctccacgctatacagcagccattcattcaaattaaacgggcgatggaaccacatggaatggtcaatggtggcaatctgaatccccggttcgagaaaaccgatgccgtgcggctgtagagctaccggcaggaagttaagatcagaagcgtaaccgagcagatactgatgaacgcgcaggtcatccggcacgctaccatttgcgcggatccacacctgacgatgtggttctgcgacgtgacctttcagtgggttatgaaactccaccggacggacttccagcggacgatcgcagatgaatttatctttcagcactggcggcagcaggtgcgccaggctttgggcgatttgcgtttcgctagggaggccatcaggcgctggcgcggacggcattgttttttgatgttcgaaacccgcttctggtgcctggaaagaggcagtcatataaaaaatcggtttgccgttttgaatagcagcaacccggcgggcgctgaagctgttaccgtcacgcagcgtttcgacatcataaataatcggcttcttactatcgccagggcgaagaaagtagctgtgaaagctatgtaccagccgctcttcagggacggtctcttttgcagcatacaaggcctgacccacgacctggccgccaaacacctggcgtaaacctaaatcttcactctggccgcgaaagagtccttcctcaattttttccagatttaacaatgtcagtaaattttttagcgcctgactcatataactctccagtaacaaagctgccgcagcaagccaaagtgagttgagtataacgcaaatttgctactggtccgatgggtgcaatggtctgaattacgggctaattacaggcagaaatgcgtgatgtgtgccacacttgttgacgttactattttgttaaccactcttccggcgaggaaagttagcccgctggtgcattgataataaggagaaatgaatgaaactcgtgcacatggccagtggtttagcggttgcgattgcgttggcggcttgcgcagataaaagcgcggatattcagacgccagcaccggctgcaaatacgtctattagtgcaacacaacaaccagctatccagcaaccgaatgtctccggtaccgtctggatccgtcagaaagtcgcactgccgcctgatgctgtgctgaccgtgacactttctgacgcgagcttagccgatgcaccgagtaaagtgctggcgcagaaagcggtgcgtactgaaggtaaacagagtccattcagctttgttctgagttttaacccggcagatgttcagccgaacgcgcgtattctgttgagtgcggcgattaccgtgaatgacaaactggtatttatcaccgataccgttcagccggtgatcaaccagggcggaactaaagccgacctgacattggtgccggtacagcaaaccgccgtgccggttcaggccagcggtggcgcaacgactaccgtacctagcactagtccaactcaggtgaatccgtctagcgcagttccagctcctacgcaatattaagcgacgttaaccctctccgcccggagagggttagtagttccagcgataacgctgcaagtcgatttgcccgcttccgcttaccatcacaccttctgccagtaatgcctgtcgctgacgctgtaaatccggtccggttaggctaattgtgccgtggcgattaaccacccggtgccagggtaaggtgctgccttcagggagacgctttaacacaccgcccacctggcgcgcggcgcgggggcttcccgccagtttcgccacatcaccgtaagtggtgacatagccttcgggaatagcggcgacgatttgccagacgcgttggggaaaactatcttctttttccatcttttcttcctgaggtaatttttcagcataatctggaaaaacgccgctgtgaagtcgcattgcgcaagaaaccagcatctggcacgcgatgggttgcaattagccggggcagcagtgataatgcgcctgcgcgttggttctcaacgctctcaatgggggctctgttggttctcccgcaacgctactctgtttaccaggtcaggtccggaaggaagcagccaaggcagatgacgcgtgtgccgggatgtagctggcagggcccccacccatttctgcctcccaccgtttcgtcaaaaaatcccaacatggctaaactttaaccacaactgacgtcgcaagaattgtctggctgcgcagtacgcttcggaggtatgtctgatgaagtatgttgatggttttgtggttgccgttcctgccgataaaaaggatgcctatcgggaaatggccgctaaggctgcgccattgtttaaagagtttggcgcgcttcgtattgtcgaatgctgggccagcgatgtaccggatggcaaagtgaccgattttcgtatggcggtgaaagcggaagagaatgaagaggttgtctttagctggattgaataccctagtaaagaggtccgcgacgctgctaatcaaaagatgatgagcgacccacggatgaaagagttcggcgagtccatgccgtttgacggcaagcgaatgatctatggcggattcgagagtatcatcgacgaataagtagcgtgacgggctgtgcggcgtgccgtcagcccaaaaattcacaaatgttgctcggcccagcgtaagaaatcttctttcggtaatgccttgctgtagagccagccctgaccgtagtgcacgccatgctggcgtaaccactcttcttgtttactggtttcgattccctccgctaccattttcagtttcagtgtttttgccatttcgatgatatgcggcgtgacatttttatattccagcgcatcaacgaaagatttatcgatcttcagaatgtcgacatccagatcctgtaaataacttaaactactataccccgtaccaaaatcatcaagataaatttcatggcccgcctcccggtagcgagaaattatcggggcgctggttttcggatcggcaaactcgcgttcagtgagttcaagcgcgatctgtctgggattaacctgatagtgattgatcatgtcacgcagcaattgcgggattttttcgctggtgagcacgggggattcaagattgatgctaatatgctgctgtggatgctgacgcagccagtcgcccatatcttcaaagacgcttcttataatcagtagcgtcaatggctcagaaaggcccgtttgctgtgccagcggaataaaactatctggactcaaccaactaccgtctgtctgcggccagcgcgccagtgcctcagcaccgacaattttgccattggctaaggagacaatcggctgatagtgcacgcaaatatcacgattttcgatagcatcctgcagccgatgatgcggactctgaatacggcgcaaaatacgcagcacaaacatcgctgccagcaggccaatcaccaacccgagcggtaaccaaataaagacttgccgatgccagcctttctgcaacattttcgtactagcccatgtgatgatgctaatattcatctccggtaagggcaggatatcgtaaatgattccattattttcgatatgctcaccgggtgttttttgtagcctggtaataattccctgagcaatttcatcgctgctggttatgacaacgttatgggcattgccaataatggcggcatcaatttgccaactgctatagggaatgacatcaataaaggaagcggggtcgatcatgacgacataatgtgccgttcccatggcgaccatgtaacggataatgcctaaatcgttatggcttgttaaccagacacgataaccatctttgctaattttacctggctcggggaaggtatcgggcggactttcatgctccagagagctacactggggaacgttgttatcgatataagccacttcctgaatatagcgataactgtaagatacccgacgcatttccatgagatgggcttcgctacaggcagcgccttgccatctttccagctcctgcagcgcatctttcccttgtgtcgccaccttattggctcgaatagcgacgcgggaggaataggtatccagctcttcaataaagcttgtttctacctgctgatgggccagccagatgcttaagccgacaggcagcaatacactaagaatcagtactccgctaataaggccgaccagatgtcgtgttctcaccagcatatccttattaacacagtgtagggaaagtatatctgattgtggaaaaaggctggctggagataaggaggtagagctggtatttcatgaagtgatgggtggaaacgatcattgtcatttgaccaggcgcagagctttacgcctggtatgtaaccctaacttaagatgtactttcggcgcgagcgagggtaaaaatatcgtaaaaagacagttcacctttacggacgatcattttttgcagttgttccttatgaacatccgcgacacgcggagagttcaagatggcttcaaccagcgcggcaggtacaaagcgcgtgttgtaccattcgccgttatagcaaacgcggaaatccagcacgtcgatatcttcatagcggtagcgtgggtagacatcgaaaaagaagaaaccattaagcaggataaataatacaaccagtagccagacagagccactcagcgtttcggactgcaacatcaccgccagggtggcaaaaaaagcaacgtacataccgataaacagccccggatgtttacggataaaactgatactaaagcggggtttgttgtcgcgtttttcgcgggtattcagagactcaatcgtttcggtcagcaggcgttgtatttcggtcatcgtttgccttcgtggtatctgcaactttccagggaacaccctattttaacgtgggaatagtagaggggaagtaacagatctaccacaattttgcataacagttgcgaaaaaccgattacaattttttaattattctggctggattaccgcccacgacaacgttgtccgggacatcttttgtgacaactgcaccactggctaccacgacgttatcaccaatggtcacaccagggttaatgaccgcgcgtccgccaatccagacgttattaccgatggtgacgggtttccccagttcagcaccgctattacgtgctacagggtcgatgggatgtgttgccgtgtagatatgaacgcctggtgccaacatacagttatcaccgatgcgaatagggcagacatcaagcatcacgcaatcgaagttggcgaaaaaattattaccgagaaaaatgttatagccatagtcacagcgaaacgttggctcaatataagcctctgtcacctgaccgaatagatcagcgagaatttgctggcgtaatgtgtgctcttccgccagggaatgattgtatcggtgaataagctgacgagcgcgcaggcgatcgcgagataacgtctcatctgcgctgcgatacaactcaccagcaatcatcttttctttttctgtgctcattactgacctccggttgctgaaaatgcggcaacacagtaagacgaaaagtcagtgaagagaacgttcccattacatctgtgtgataaagatcacatagggtatgtcttcatggcgaaaaagtataaaattcttaataaacagccggttatagctccgaaagcgaattatttattagcgaataaatttccatacactggaagggatcttgtcgtacagtttattcatggtcaattcggcgaggcggtgatctgcggcactgtaaaataccgccagttcattatcacttaattcgtatttatttttctcgataacacgctccagcgtgtcaattgtctggcaacgacgtaaacgcattaaataatcggttttcgttaaaggtttttcggacatacttctacctatggttgtaataattttaacaagataaactcgcaggattctctttcgtcgcattgacaaaacaacggaatagtcgattaccactcttccgccatttctgaagatcctgcatattaataccataactactgaacaacataaaggtgtcatccagatattcgtcgatctgctcaatgagcttattgtcttcattatacttaattttgtaattaagtgcgaaggtcgcaatatgctcaatcagttcattcaactggaggttgatcgcgctggttgggtcgtttacccagccatgattgctttcttcaaggtttgcaaggcagtcatgatacagggtttcacagagaaacttaagctgtgcgatatcatgtcttttgggactgtattcatccataacgcgtccccttcttagcggttgaactaacggacacctttcgggatggaaaaaacttactgacctggacttgccctctcgtttgttagcttaactataagccactctttgcaggttttcatcgcattattacgaaaaattacaattaggaaggaagcgggacaggactcactttttcatactagcactaacccgcagcaggtaaaagcagtttgctcgaactattcataacatttcaggattatcgccagatgaaattggtgacactaataccaggattgctctgaatatgacgtaataaccgaggaatgaataaagaattaccgcaaataattaagaatagcctctaaatgattatggattattaaatctattagcgctacttaatataaattaactaacaatcagtattttttatgaattttatccgtggttaatactggttttcgtatgagatcctgagttggtggttcaattactccttaatgttcgtaggttatgcataaaaaaggccgcttacgcggccttagtgattacacgttgtatcaatgatgatcgacagtatggctgtgctcgatatcttcattcttgcggctaaagcggcggcgaaccaccacaaagaataccggaacgaagaagattgccagtaccgttgcggtcaccatcccgcccattacaccggtacctactgcgttctgcgcgccggaaccagcaccagtactgataaccagcggcataacgccgaggataaacgccaggctggtcatcaggatcggacgtaaacgcatccgcaccgcatcaagcgtcgcttcaatcagacctttaccttctttatccatcaagtctttggcgaattcgacgataaggatcgcgttcttcgcgctcaacccaatggttgtgagcaggcctacctggaagtaaacgtcattggtcaggccacggaaggtggcagccagcaacgcaccgataacccccagcggaacgaccagcataacggagaacggaatgctccagctctcgtacagcgccgccagacacaggaacacgacaatcaagctaatcgcgtacagactaggtgcctggttgccggagagacgttcctgataggacatccccgtccagtcatagccaacaccggtaggcagtttgctcgccagttgttccatcagctccattgcttcaccggtacttttacccggtgccgcctggcctaagatttccatggatggcaggccgttgtaacgttccagacgcgggctaccgtactcccaacgagaagaggagaacgcgctgaatggcaccatctgaccatcagcagcacgaacataccagtcgccgatatcatccggcagcatacggtatttcgcttcactcatgacataaactttcttcacacgaccgcggtcgataaagtcgttcacatagctgccgccccatgcagcgcccagagtggtgttaatgtcgttgatagaaacacccagcgcctgcgctttttcctggtcgatatcaatcttaaactgcggggtatcttccagaccgtttggacgtacgctggtcaacatatcagggtgcttcgctgcttctgcaagcaactggttacgcgcctgagtcagtttttcgtgaccaaggccagcctggtcaatcagctcaaagtcaaagccggttgcagtacccagttccacgattgcgggcaggttaaaggcgaaaaccatcgcatctttgatttggctgaaagcgcgtgttgcacgcatggtaatcgcttcaactttgttttcttcgcccggacgatcggcccagtccttcaaggaaacgaacgcaataccggtattctgaccacgtcccgcaaagccgaagccgttaacggcgaacacgctctcaacgttgttcttttctttggtcagatagtaatgcgttacctcattgagcactttctgtgtacgttcctgcgttgcacctgctggcagctgaaccatggtcataaacacgccctggtcctcatctggcaagaaggagcttggcagacgcacgaacagataggccatgccgaccacgatgatcagatacagcaccaggtaacgccccgtactgcgcagaataccgcctacgctgtcggtgtagtggtgcgtgctcttctcgaacatgcggttaaaccagccgaagaagccttttttaccttccccgtgatcgcctttggcaatcggtttcagcatggtggcacaaagagctggagtcaggatcaacgccaccagtacgctcagcgccattgcactaacaatggtaatagagaactgacgatagatagcaccagtagaaccgccaaagaaggccatcggtacgaataccgcgctcagtaccatcgcgataccgaccagagcgccctgaatctgccccatgctcttacgggtagcttcttttggcggcaaaccttcttccgccataacacgctcaacgttttctaccacaacgatggcgtcatccaccaacaggccgatggcgagcaccatcccgaacattgttagcgtgtttatgctgaagccaaaggcggcaaggacggcaaaggtcccgagcaataccaccggtacggcaatggtcggaatcaacgtcgcgcggaagttctgcaggaacagatacataaccaggaacacgaggatgatcgcttcgaccagcgttttaaccacttcgtgaatagagattttcacgaacggcgtggtgtcgtatgggtaaacaattttcagaccgctcgggaagaacggttccatcttcgccagttcagcacggattgccgcagcggtatccagcgcgtttgcaccggtcgccagcttgatccccagaccggaagccggttggccgttaaactctgcgatgatgtcgtagttctcaccacccagctcaatcttcgcgacgtcacgcagcagcacgcgggaaccatcctgattcactttcagcaggattttgccgaactcttcagtagaggtcagacgcgtctgagcaataatagaggcgttaagctgttggcctttcaccggcggcgtaccaccgagctgacccgccgcaacctgggcgttctgcgctttgatggcggtaatgacatcaaccggcgttagctggaatttgttcagctcattcgggttcatccagatacgcatcgcgtactgactaccgaacaactgaacatcacccacgccgctcgtacggctgatggcatctttcatattcgccgccacgtagtcggagatatcctcctgcgtcatggtgccatcggtgttgataacgccgacaaccatcaggaagctgctggaacttttctcaacgctcaccccttgctgctgaacttcttgcggcagcaacggcatcgccagctgcagtttgttctgcacctgaacctgcgcgatatccgcatcagtaccagactcaaaggtcagggtgatctgcacggtacccgtggagtcactgttagaggacatgtacatcaggttatcgataccgttcatattctgttcgataacctgtgtcaccgtgtcctgcactgttttcgcatcagcgccggggtaggaggcggagatcgttactgccggcggtgcaatcgtaggatgttgcgccaccggcagtttgaggatcgccagcccccctgccaacatgatgataatggcgatcacccacgcaaaaatcgggcgatcgataaagaaattaggcatgtcttaacggctcctgtttaagttaagacttggactgttcaggctgagcaccgcttgcggcttgctggttattatcagcggtaacttcttgtgcttttacctggacaccaggacgcactttctgcagcccacttattactacgcgatcgcctgctttcagaccttctgtcaccagccacttatcgccaatagcctggcttgcaacgatcggacgggtttccactttgtcatccgcgccaactaccagtacggtggcatcgccacgcggcgtacgggttacgccctgttgcgggactaaaatagcgtttggattaagcccttcttccagacgtgcgcgcacgaacatacccggcagcagagtgtgatccgggttcgggaagatagcgcgtagggtgatagacccagtggtctgatcaacggtaacgtcagagaattccagcgtaccgtcctgcgggaacttaatgccgtcactggtgatcagactcactttggctttgccgttctcttgtttcagcgtgccattcgccagttcctgtttcaggcgcaggaagtcgttgctggactgggtcacatcaacgtagatcggatcaagttgctgcacggttgccagcgcagtcgcctgaccgttctgtaccaatgcgccttccgtcacgttgctcttaccaatgcgaccgctaatcggagaggtgactttggtgtaagccagattgatccgcgcagtttcaacggcagctttcgccgcagttaccgcagcattcgcctgttgcgcatcagccagagcctgatcgtactcttgcttactgatgtactgagtaccgagcagtttctgataacgattcaccgtcaattgcgcgatattggctgcagcctgggctttcgccagatcacctttcgcactgtcgtatgtcgcctgataggtcgcaggatcaatctgatagagagagacacctgcttcgatgtcgctaccttctttgaaattacgcttcaggataatcccgctaacttgaggacgaacttctgcgatccggtaggcactggtgcgacccggaagctcggttgtgatctgcagaggttcagttttgactgttactacgccaacggcgggcatctgctggccaccttgttgggcctgtttgtcgtcacatcctgttagggctaagctgccactgagcatcagaacgaccgccagaggcgtaaaccctctgtttttgttcatatgtaaacctcgagtgtccgatttcaaattggtcaatggtcaaaagttaataaacccattgctgcgtttatattatcgtcgtgctatggtacatacattcacaaatgtatgtaaatctaacgcctgtaaattcacgaacatatggcacgaaaaaccaaacaagaagcgcaagaaacgcgccaacacatcctcgatgtggctctacgtcttttcagtcagcagggggtaagttccaccagcctgggcgagattgcaaaagcagctggcgttacgcgcggtgcaatctactggcattttaaagacaagagcgatttgttcagtgagatctgggaactgagtgaatccaatattggtgaactagagcttgagtatcaggcaaaattccctggcgatccactcagtgtattaagagagatattaattcatgttcttgaatccacggtgacagaagaacggcgtcgattattgatggagattatattccacaaatgcgaatttgtcggagaaatggctgttgtgcaacaggcacaacgtaatctctgtctggaaagttatgaccgtatagaacaaacgttaaaacattgtattgaagcgaaaatgttgcctgcggatttaatgacgcgtcgcgcagcaattattatgcgcggctatatttccggcctgatggaaaactggctctttgccccgcaatcttttgatcttaaaaaagaagcccgcgattacgttgccatcttactggagatgtatctcctgtgccccacgcttcgtaatcctgccactaacgaataaccctgaatctgactccaggatttttcctggacattttcgtcgttgctattctggttcactgcgtcgtgatattcttgcggtttgactttttcaggtcgttcttcaggttcagaaaccttcattcatcatgactatgttccagtattacaaacgaagtcggcattttgtttttagtgcatttattgcttttgtttttgtcttgttatgccagaacacggcgtttgcgcgggcgagtagcaatggtgatctgccgacaaaagcggacctgcaggcgcaacttgacagtctaaataaacaaaaagatctttctgctcaggacaaactggtgcagcaggatctgacagatacattagccaccctcgataaaatcgatcgcataaaagaagagacagttcagctacggcaaaaagtcgctgaagcgccggaaaaaatgcgccaggcgaccgcggcgttaacagcacttagcgatgtcgataacgacgaagaaacgcgcaaaattctgagcacgctgagcttgcgccagctggaaactcgcgttgcccaggcgctggacgatttgcaaaacgcacaaaacgatctggcgtcttataacagccagctggttagcttacagacgcagcccgaacgcgtgcaaaatgcgatgtataacgctagccagcagctgcaacaaattcgcagtcgtctggatgggactgatgtcggcgagacagccttacgtcccagccagaaagtgttaatgcaggcccagcaggcgttgctgaatgcggagattgaccagcagcgtaaaagcctggaagggaacaccgtcttgcaggataccttgcaaaagcaacgtgattacgtgacggcgaacagcgctcgtctggagcaccagttacaactgttgcaagaagcggtaaacagcaagcgcctgactttaaccgaaaaaacggcgcaggaagccgtctccccggatgaagccgcgcgtattcaggctaatccgctggtgaagcaggaactggaaattaaccagcagttaagtcagcgtctgattaccgcgactgaaaacggtaatcagttgatgcagcaaaacattaaagtcaaaaactggctggagcgggcgctgcaaagcgaacgcaatattaaagagcagattgccgtcctgaagggcagcctgctgttgtctcgtatcctttaccagcaacaacaaacgctgcccagcgcggatgaactggaaaacatgaccaaccgcatcgcggatttgcgtctcgaacagtttgaagttaaccagcagcgtgatgcactcttccagagcgatgcgttcgtcaacaaactggaagaaggtcacaccaacgaagtcaacagcgaagttcacgatgcgttattgcaagtggttgatatgcgtcgcgaattgctggatcaactcaacaaacagttgggtaaccagctgatgatggccattaacctgcaaatcaaccagcagcagttaatgagtgtgagcaaaaacctgaaatccatcctgactcagcaaatcttttgggtgaacagtaaccgtccaatggactgggactggatcaaagcgttcccgcaaagcctgaaagatgaatttaagagcatgaaaatcacggtgaactggcaaaaagcctggcccgccgtttttatcgctttcctcgctggtttgccgctgctgttgattgccgggctgatccactggcgtctgggctggctgaaagcgtatcaacaaaaactggcttccgctgtgggttccctgcgtaacgacagccagctcaacacaccaaaagcgatccttatcgacctgatccgtgcgctgccggtgtgcctgattattctcgcggttggcctgattctgttgaccatgcagctcaacatcagcgaactgctatggagcttcagcaaaaaactggcgatattctggctggtgtttggcctgtgctggaaggtactggagaaaaacggcgttgccgtacgtcacttcggcatgccggaacagcagaccagccactggcgtcggcaaattgtccgcatcagtctcgcattgctgcctatccatttctggtctgtggtggcagaactttccccgctgcatctgatggatgatgtgctggggcaagcgatgattttcttcaacctgctgctgattgccttcctggtatggccgatgtgccgcgaaagctggcgtgataaagagagccacaccatgcgactggtcaccattaccgtgctgagcataatcccgattgcgctgatggtgctgactgctacaggctacttctacactacgctgcgtctggcaggacgctggattgaaaccgtttatctggtgatcatctggaacctgctgtaccagacggtactgcgtggcttaagcgtagcggcgcggcgtatcgcctggcgtcgtgcgctggcgcgtcggcagaatctggtgaaagagggcgcagaaggtgctgaaccgccggaagaacccaccattgcactggagcaagttaaccagcagacgctgcgtattaccatgttgctgatgtttgcgctgttcggtgtcatgttctgggcaatttggtccgatttgatcaccgtgttcagctatctcgacagcatcacgctctggcattacaacggcactgaagctggcgctgcggtggtgaaaaacgtcaccatgggcagtctgttgtttgcgattatcgccagtatggtggcctgggcgttgattcgcaacctgcctggtttactggaagtgctggtgctcagccgactgaatatgcgccagggcgcgagctatgccattactaccatccttaactacatcattattgctgttggtgcgatgacggtgttcggaagcctgggcgtctcttgggataaactccagtggctggccgcagcattatccgtaggtcttggttttggtttacaagaaattttcggtaacttcgtctccggtttgatcattctattcgaacgtccggtgcgtattggcgatacggtaaccattggtagcttcagcgggacggtaagtaagatccgtattcgtgcgacaacgattaccgatttcgatcgcaaagaagtgatcatcccgaacaaagcgtttgttaccgagcgtctgatcaactggagcttgactgacactactacgcgtctggtgatccgtctcggcgtggcctatggctccgatctggaaaaagtgcgtaaagtgttactgaaggcggcgactgagcacccaagggtgatgcacgaaccaatgccggaagtcttctttacggcatttggtgccagcacgttggatcatgagctgcgtctgtatgtgcgtgaactgcgtgaccgtagtcgtactgtcgatgagctgaaccgtactatcgatcagctgtgccgtgaaaacgacatcaacattgcctttaaccagcttgaagtgcatctgcacaacgagaagggcgatgaggtgacggaagtaaaacgcgactacaaaggcgatgacccgacgccagcggtagggtaaaaacgaaagggggcaacatttagttgccccgagattgctaacaaagtgcgcgttgttcatgccggatgcggcgtgaccgccttatccggcctacgaaaccgcaagaattcaatatattgcaggagcggtgtaggcctgataagcgtagcgcatcaggcagttttgcgtttgcccgcaaccttaggggacatttagcgaccccatttatttctcacttttccgcctcatcatcgcgcgttaatttcttttcataatcacgctttacaatatccagcgcgcgcagcacggtactggcagggatctgattttcctccagcagcacaatcaaatcgacagccagtttgacatcgtcaggggcattttccagactcatattctctccattgttagcgggttaaacgcgctaacctgttttcgattttttccagcgcatggcggcagcgtgccaggcgcgcttcataggcttccacttcacgatgcagcgtttgctgttccacgagatcggtcacccgcgccagacgggctctgcgttcggcaaccatctcacgtagccgccgctcaaaatcctgatgctgaatacgtttacgctgccagcgggcaattttcggtggtgcactgtcccactcgcgcaaactccaggcggaggcttcacgcgcgatggcttccagttgtgccgccagatgttccgccagccaggccacttgcggcagctgttgctgctcaactgcatgacgaagcgcagccagattatcgcccgcctcgtcgagacaagcctgtagtgttgtcgcacgagtctgaaaaagatgcctgtcgaaacgagcacttagcgtggcgaactgactcaccggggcacaacgctgacgcagcgtagcgagctgtccttccagtttttccagcagcagggcggttttcacgataagacctcaatgaaaatgataattgttatgctaaagtagccactctgtaagctgacaacactcaatatgcaacgaatcattttaatcatcattggctggctggcggtagtgctgggtacgctgggcgtggtattaccggtattaccgacgacgccgtttatcctgctggcggcctggtgctttgcccgttcttccccgcgctttcacgcctggttgctgtaccgcagttggtttggcagctatctacgtttctggcagaaacatcatgcgatgccgcgcggcgtcaaaccgcgggcgattttgcttattttgctcacgtttgccatttctctgtggttcgtccagatgccatgggtgcgcatcatgttgctggtaattctcgcctgtttgcttttctatatgtggcgaattccggtgattgatgaaaagcaagaaaagcactgaagcacaacaatcgcagttgcaattattgcgtacagccagtacattctggcgttttcgagcacaggcgcaggcggtcaaaggttaaacaactgttacttttgatacgtttaaaacgcgccgtgagtaccaccgtaacaagcaggcatacacttatgaccgcgactgcacagcagcttgagtatctcaaaaatagcatcaaaagcattcaggactacccaaaacccggcattcttttccgcgatgtcaccagcttactggaagacccgaaagcttacgctctcagcatcgacttgctggttgagcgttacaaaaatgcgggcattaccaaagttgtcggcaccgaagcgcgtggcttcttgtttggcgctccggtagctctgggtctgggcgttggctttgtaccggtccgtaaaccgggcaaactgccgcgtgaaaccatcagtgaaacttacgacctggaatacggcaccgatcagctggagatccacgttgatgccatcaaaccgggcgacaaagttctggtggtggacgacctgctggcaaccggcggcactatcgaagcgaccgttaaactgatccgtcgtctgggtggtgaagtggctgacgctgcgttcattatcaacctgttcgatctcggcggcgaacagcgtctcgaaaaacagggcattaccagctacagccttgtcccgttcccgggccattaattatcgccagtcttgtgctgcccacgctacggacagcacaagatgtgcattcagcctcgccgttctgacggggctgtgttagcattaccccttcgtgaatccaccttccagcgtttcagagcctgccaatgagttatcaggtcttagcccgaaaatggcgcccacaaacctttgctgacgtcgtcggccaggaacatgtgctgaccgcactggcgaacggcttgagcttggggcgtattcatcatgcttatcttttttccggcacccgtggcgtcggaaaaacctctatcgcccgactgctggcgaaggggctaaactgcgaaaccggcattaccgcgacgccgtgcggcgtgtgcgataactgtcgtgaaatcgagcaggggcgctttgtcgatctgattgaaatcgacgccgccagccgcaccaaagttgaagatacccgcgacctgctggataacgtccagtacgctccggcgcgtggtcgtttcaaagtttatctgatcgacgaagtgcatatgctgagccgccacagctttaacgcactgttaaaaacccttgaagagccgccggagcacgttaagtttctgctggcgacgaccgatccacagaaattgccggtgacgattttgagtcgctgtctgcaatttcatctcaaggcgctggatgtcgagcaaattcgccatcagcttgagcacatcctcaacgaagaacatatcgctcacgagccgcgggcgctgcaattgctggcacgcgccgctgaaggcagcctgcgagatgccttaagtctgaccgaccaggcgattgccagcggtgacggccaggttagtacccaggcggtcagtgcgatgctgggtacgcttgacgacgatcaggcgctgagcctggttgaagcgatggtcgaggccaacggcgagcgcgtaatggcgctgattaatgaagccgctgcccgtggtatcgagtgggaagcgttgctggtggaaatgctcggcctgttgcatcgtattgcgatggtacaacttagccctgctgcacttggcaacgacatggccgccatcgagctgcggatgcgtgaactggcgcgcaccataccgccgacggatattcagctttactatcagacgctgttgattggtcgcaaagaattaccgtatgcgccggaccgtcgcatgggcgttgagatgacgctgctgcgcgcgctggcattccatccgcgtatgccgctgcctgagccagaagtgccacgacagtcctttgcacccgtcgcgccaacggcagtaatgacgccaacccaggtgccgccgcaaccgcaaagtgcgccgcagcaggcaccgactgtaccgctcccggaaaccaccagccaggtgctggcggcgcgccagcagttgcagcgcgtgcagggagcaaccaaagcaaaaaagagtgaaccggcagccgctacccgcgcgcggccggtgaataacgctgcgctggaaagactggctagcgtcaccgatcgcgttcaggcgcgtccggtgccaagcgcgctggaaaaagcgccagccaaaaaagaagcgtatcgctggaaggcgaccactccggtgatgcagcaaaaagaagtggtcgccacgccgaaggcgctgaaaaaagcgctggaacatgaaaaaacgccggaactggcggcgaagctagcggcagaagccattgagcgcgacccgtgggcggcacaggtgagccaacttagcctaccaaaactggtcgaacaggtggcgttaaatgcctggaaagaggagagcgacaacgcagtatgtctgcatttgcgctcctctcagcggcatttgaacaaccgcggtgcacagcaaaaactggctgaagcgttgagcatgttaaaaggtagtacggttgaactgactatcgttgaagatgataatcccgcggtgcgtacgccgctggagtggcgtcaggcgatatacgaagaaaaacttgcgcaggcgcgcgagtccattattgcggataataatattcagaccctgcgtcggttcttcgatgcggagctggatgaagaaagtatccgccccatttgatcgtaagcacagcttacgttcgtcatccttaacgtgattgagagagaaacctatgtttggtaaaggcggtctgggtaacctgatgaagcaagcccagcagatgcaagaaaaaatgcagaaaatgcaggaagagatcgcgcagctggaagtcaccggcgaatctggcgcaggtctggtaaaagtgaccatcaacggtgcacacaactgccgtcgcgtagagatcgacccgagcctgctggaagacgacaaagagatgctggaagacctggtggctgcagcattcaacgacgcagcacgtcgtattgaagaaacgcagaaagaaaaaatggcctctgtatcctccggaatgcagctgccgcctggctttaagatgccgttctgatgcaaaccagcccgctgttaacacagcttatggaagcactgcgctgtctgccgggcgttggcccgaagagcgcgcagcgtatggcgttcacgctgcttcagcgcgatcgtagcggcgggatgcgtctggcgcaggcgctcacccgggcgatgagcgaaatcggccactgcgccgattgccgcactttcaccgaacaggaagtctgtaacatctgtagcaatccgcgtcgtcaggaaaacggtcaaatctgcgtggtggagagtccggcggacatctacgccattgagcagacggggcagtttagtggtcgttattttgtgttgatggggcatctgagtccgctggacggcatcggtccggatgatatcgggcttgatcgtctggaacagcgtctggcagaggaaaaaatcactgaagtgatcctcgccaccaaccccacggttgaaggtgaagctaccgctaactacattgccgagctttgcgcgcaatatgacgtggaagccagccgaatcgctcatggcgttccggttggcggcgagctggaaatggtcgacggcaccacgttgagtcactcccttgccgggcgtcataagattcgtttttaagcaaacgagagcaggatcacctgctctcgcttgaaattattctcccttgtccccatctctcccacatcctgtttttaaccttaaaatggcattattgaggtagacctacatgaaaggacaagaaactcgtggttttcagagtgaagtgaaacagcttctgcacctgatgatccattctctctattccaataaagaaatcttcctgcgtgagcttatctctaacgcctccgatgcggcggacaagctgcgtttccgtgcgctctctaacccggacctgtacgaaggtgatggcgaactacgcgttcgtgtctctttcgataaagacaagcgtacgctgaccatctccgataacggcgtggggatgacccgcgacgaagtgattgaccatctggggactatcgctaaatccggtaccaaaagtttcctcgaatccctgggttctgaccaggcgaaagacagccagctgatcggtcagtttggtgttggtttctactctgcgtttatcgtggccgacaaagtgaccgtgcgtactcgcgcggcaggcgaaaaaccagaaaatggcgtcttctgggaaagcgctggcgaaggtgaatacaccgttgccgacatcaccaaagaagatcgtggtactgaaatcaccctgcatctgcgtgaaggcgaagacgagttcctcgatgactggcgcgtgcgttccatcatcagcaaatactccgaccatatcgcgctgccggtagagatcgaaaaacgcgaagagaaagacggcgaaaccgttatctcctgggagaaaatcaacaaagcgcaggcgctgtggactcgtaacaagagcgaaatcaccgatgaagagtacaaagagttctacaaacacatcgcccacgactttaatgatccgctgacctggagccacaaccgtgttgaaggtaagcaggagtacaccagcctgctgtacatcccgtcccaggctccgtgggatatgtggaaccgcgatcataaacacggcctgaaactgtatgttcagcgtgtgttcatcatggacgacgcagaacagttcatgccgaactatctgcgcttcgtgcgtggtctgattgactccagcgatctgccgctgaacgtttcccgtgaaatcctccaggacagcacggtaacgcgtaacctgcgcaatgcgctgaccaagcgtgtgctgcaaatgctggaaaaactggcgaaagacgacgcggaaaaataccagaccttctggcaacagtttggcctggtactgaaagaaggtccggcggaagatttcgctaaccaggaagcgatcgccaaactgctgcgttttgcttctacccataccgattcttctgcgcagaccgtatctctggaagactacgtttcccgcatgaaagaagggcaggagaaaatctactacatcaccgcagacagctatgcggcagcgaagagcagcccgcacctggaactgctgcgtaagaaaggcatcgaagttctgctgctttccgaccgcatcgatgagtggatgatgaactatctgactgagttcgacggtaaaccgttccagagcgtgtctaaagttgacgagagccttgaaaaactggctgacgaagttgatgagagcgcgaaagaagcggagaaagcactgactccgttcatcgaccgtgtgaaagccctgctcggcgagcgcgtgaaagatgtccgtctgactcaccgtctgaccgatacgccagcgatcgttagcaccgacgcggacgaaatgagcactcagatggcgaaactgttcgctgcggcgggccagaaagtgccagaagtgaaatacatcttcgaactgaacccggatcacgtactggtgaaacgtgcggcagatactgaagatgaagcgaagttcagcgagtgggtagaactgctgctggatcaggcgctgctggcagaacgcggcacgctggaagatccgaacctgtttattcgtcgtatgaaccagctgctggtttcctgatgtaatgccggatgaccttcgtgtcatccggcatttttcttttcatcatctgcactttccgcaaattatctcgccattaaccgtttcagccccaggtgcctttcttgaggcaatcgcctgttggtggtatcgtttatcgctttttcaaaaaattcgacacattttaaggggattttcgcaatgcgtatcattctgcttggcgctccgggcgcggggaaagggactcaggctcagttcatcatggagaaatatggtattccgcaaatctccactggcgatatgctgcgtgctgcggtcaaatctggctccgagctgggtaaacaagcaaaagacattatggatgctggcaaactggtcaccgacgaactggtgatcgcgctggttaaagagcgcattgctcaggaagactgccgtaatggtttcctgttggacggcttcccgcgtaccattccgcaggcagacgcgatgaaagaagcgggcatcaatgttgattacgttctggaattcgacgtaccggacgaactgatcgttgaccgtatcgtcggtcgccgcgttcatgcgccgtctggtcgtgtttatcacgttaaattcaatccgccgaaagtagaaggcaaagacgacgttaccggtgaagaactgactacccgtaaagatgatcaggaagagaccgtacgtaaacgtctggttgaataccatcagatgacagcaccgctgatcggctactactccaaagaagcagaagcgggtaataccaaatacgcgaaagttgacggcaccaagccggttgctgaagttcgcgctgatctggaaaaaatcctcggctaattcgaaagcgcgcacggacagtcccctcgccccctcggggagagggttagggtgaggggaacaggcccgcacaagcaaacttatcagcaatctcaggccggatattcattcggccttttacaaaaacctcaatctgcgctattcctttttctgatttgacctctcacagcaattagttcttcttcctcacttttccgctacaattatcaacaagttgaatcgataagaggcggtaatgcgtcagactaaaaccggtatcctgctggcaaacctgggtacgcccgatgcccccacacctgaagcggtaaaacgctatctgaaacaatttttaagcgacagacgcgtggttgataccagtcggttgttatggtggccattgctgcgcggcgtgattttgccgctgcgcagcccgcgtgtggcgaagctgtatgcctctgtctggatggaaggtggcagcccgctgatggtttacagccgccagcaacagcaggcgctggcacaacgtttaccggagatgcccgtagcgctgggaatgagctacggcagcccaagtctggaaagcgccgtagatgaactcctggcagagcatgtagatcatattgtggtgctgccgctttatccgcaattctcctgttctacggtcggtgcggtatgggatgaactggcacgcattctggcgcgcaaacgtagcattccggggataagctttatacgtgattacgccgataaccacgattacattaatgcactggcgaacagcgtacgcgcttcttttgccaaacatggcgaaccggatctgctactgctctcttatcatggcattccccagcgttatgcagatgaaggcgatgattacccgcaacgttgccgcacaacgactcgtgaactggcttccgcattggggatggcaccggaaaaagtgatgatgacctttcagagccgctttggtcgggaaccctggctgatgccttataccgacgaaacgctgaaaatgctcggagaaaaaggcgtaggtcatattcaggtgatgtgcccgggctttgctgcggattgtctggagacgctggaagagattgccgagcaaaaccgtgaggtcttcctcggtgccggcgggaaaaaatatgaatatattccggcgcttaatgccacgccggaacatatcgaaatgatggctaatcttgttgccgcgtatcgttaaagctgagcggtaaagaactgagcgccgtcgcgaagagcctcgtcggcggttttcatcatccgactataatgcaaaaaggcgtgcagcgtgcctgggtagagtttgaactcacagggctgctgatgcgccgctaacgtctggtaaagcagacggctgtcatccagcagcggatcgaactccgccccggcaataaaacagggcggaacttcgcgagtgagatcattattaaacagacagtaatacgggctctcgcggtccgcgtcgttgcttaaatatgcctcttcgtacatctgcaaatcctgttgcgttaagccatcccagacaccgcccaacagacgacgagtcacggaatcccgtaatccgtaaagcccataccacagcaaaacgcccgcaactttaccgcaatcgatctgtttatcacgcaaccacaacgcactggcgagcgccagcatggcacctgcggaatcaccggcaaagccaatgcgggacatattgatttgataatcctccgcctgctggtggaaataacaacaagcagccacaatttcctctatcgcttgcggaaaacgcgcttcaggactaagggtgtaatcaataccaatcaccgtacattggctgtagcttgccagcaggcgcatgatgcgatcgtgggtatcgagattgccgagaataaaaccgcctccatgcaaataaaatagcgtcgctgggctatctggctgcggacaaaagagacgtgtttccacctgcccatattttgttggaaccatgtaagctctggttgccatttctggagcgcccgcattccagaatcggcgctcaagcgtgtaatactgtcgttgctcagcaatcgttcccgttgcgggccagggcggtaaatccggctgaagagtattcacaacggtcttcatttcagcagaaataaggtccagaacaggtagtttgttttccggcttcatacaaaaactcctttcaaattacgtcattgtaaggaaccactgccatgaaaatgcgatcccgcctgctgatattgaaactggctgcgtctcgcgcgctcccgtcagattgtgttaacattcgccgctcagttaaccacccgtaaaaacaaccatgaaatttcccggtaaacgtaaatccaaacattacttccccgtaaacgcacgcgatccgctgcttcagcaattccagccagaaaacgaaaccagcgctgcctgggtagtgggtatcgatcaaacgctggtcgatattgaagcgaaagtggatgatgaatttattgagcgttatggattaagcgccgggcatagtctggtgattgaggatgatgtagccgaagcgctttatcaggaactaaaacagaaaaacctgattacccatcagtttgcgggtggcaccattggtaacaccatgcacaactacagcgtgctcgcggacgaccgtagcgtgctgctgggcgtcatgtgcagcaatattgaaattggcagttatgcctatcgttacctgtgtaacacttccagccgtaccgatcttaactatctacaaggcgtggatggcccgattggtcgttgctttacgctgattggcgagtccggggaacgtacctttgctatcagtccaggccacatgaaccagctgcgggctgaaagcattccggaagatgtgattgccggagccagcgcactggttctcaccagttatctggtgcgttgcaagccgggtgaacccatgccggaagcaaccatgaaagccattgagtacgcgaagaaatataacgtaccggtggtgctgacgctgggcaccaagtttgtcattgccgagaatccgcagtggtggcagcaattcctcaaagatcacgtctctatccttgcgatgaacgaagatgaagccgaagcgttgaccggagaaagcgatccgttgttggcatctgacaaggcgctggactgggtagatctggtgctgtgcaccgccgggccaatcggcttgtatatggcgggctttaccgaagacgaagcgaaacgtaaaacccagcatccgctgctgccgggcgctatagcggaattcaaccagtatgagtttagccgcgccatgcgccacaaggattgccagaatccgctgcgtgtatatagccacattgcgccgtacatgggcgggccggaaaaaatcatgaacactaatggagcgggggatggcgcattggcagcgttgctgcatgacattaccgccaacagctaccatcgtagcaacgtaccaaactccagcaaacataaattcacctggttaacttatagtagcttagcgcaggtgtgtaaatatgctaaccgtgtgagctatcaggtactgaaccagcatagtcctcgtttaacgcgcggcttgccggagcgtgaagacagcctggaagagtcttactgggatcgttaagttatcgtcggttcgtaggccagataaggcgttcacgccgcatctggcatttggctctcgatgcctgatgcgacgctggcgcgtcttatcatgcctacatatttttcatattttacatccggcaaccaccgtttaccccgtcaccacctcacccgccggtggcgtttccagcagttccagcatggtacgggcgatttcacgctcgcccatcactacctgattcgcaccacgttcggtgatatacgccacttcatcgtcataatgggcgcgggcaataatctcaatatccggatttttcgcgcgggcagatgccacaatctcacccgcttcataaccgttgggaatcgtcaggatcagccattttgcacattccagatgcgccagttgcataatttcttcgttcgccgcattgcccaatactgcgcggaccccgcgctctcgcagctcatcaacacgggttcgactcgtctcaatcaccaccagcggaatatcagaggcgagcaatttctcccccagcaggctgcctacacgaccgtaacccaccagtagcgcatggttgcaaatatccactgggatctgcttctcttcttcgattgcctcttccagcgtctgctcttccagcgtttcggtcttcgccagatatttctccagtagtgcgaacagtaccgggttgagcataatgctcaggatcgcccctgccagtaccaggttttgtccggcctgcggcagtaaattcaatgccattcccagtcccgccaggataaacgcgaactcaccaatctgcgccaggctggcggcgatggttaatgccgtacgttgggagtgaccaaacagtcgcaccaggaaaaatgcggctaagctcttaccaaacagaataatcgccagcgtcgccagcactgccagcggttgctgaatcagaattaacggatcaaacaacatcccgacggagacaaaaaacagcaccgcaaacgcgtcgcgcaatggcagcgtatcgtgggcggcacggtgactcagttcagactcgttcagtaccatcccggcaaagaacgcaccgagtgcaaaggagacatcaaacagctctaccgcaccaaaggcaacccctaacgccagcgccagcacgctcagggtaaacagctcgcgagaaccggttgccgcgctgcgtgccataatccacggcaccagacggcgacctaccagcatcataatggcgataaatgcgatcactttgccgatggtgatccccatatcgactgcaagagtggcaaagcccacatcgccctgttccatcattcctgccactgcgggcagcaacaccagcgtcagaaccattaccaggtcttccacaatcaaccaaccgatggcgatttgcccacgctgactgtcaattaattgccgttcttcaagtgcgcgcagtaacaccacggtactggcggtggaaagacataaaccgaacacgataccggtcattaagctccagcccagcacggcagagagcgccatacccagcagcgtcgccacggctatctgggcgatcgcaccgggaatggcgatggcctttaccgccatcaaatccttcaggctaaagtgcaaaccgacgccaaacatcaacagaatgacgcccagttcagccagttccggggcaagcttggtatcggcaacaaagcccggagtgaatggtcctgccagcacacccgctaacagatatcccaccagaggagaaatacgtagtttattggccagcatgccgaggataaaggcgagcacaaggccgccaacaatggtggtgataagcggggtggcgtgatgcattccgtctccttttcctggtggttattgtccatttttggccgggaaaaccaaaattacaggtaatagtttatgacaatttcattgatgatgttcatgaataattattgaattttgcagaaaaatggaattagctgcaaaaaaagcacggatcggaaaacagaaggcggtttaacagaggaaaggcttatggcgactgtaaaacgatgcagccaaagtttgcctttggctgcaatgaaatcagtctttatgccggttatcaggcaggaatatggtcaacatccccaatagtggcaggaaagcacagattttatagactaactcgatgctggtgtgatcggcgataagccccagaactgccgctcccagacctcccatgccaaaagcaaaaccgaaaaagagtccagaaaccataccgatacgtcctggaagcagctcctgagcgtagaccagaatggcagagaatgcgctagcgaggataaatccaataatcaccgttaaaacccccgtccagtgcaggctggcgtagggtaaaatcagcgtaaacggcgcaacgccgaggatagagccccaaatcacatatttccgcccaattttatcccctacaggcccgccgatcaccgtacctgccgcaacggcaaacaggaaggcaaacagatgaagctgagcattctggatagataatccgaatttttgcatcagataaaaggtgtaatagctgctgatgctcgccatatagaaatatttgctgaaaatgaggattaacagaatgctgaccgccagtacaactttattgcgcggcagtggattgataatcgtcgctttgggttttcctttattcattcggtgctgtgcgctgtaccaacggctgatttgcgccaacaccacgatcgccagcagtgccgcaagcacaaaccaggcaacgttgcctttgccataaggcgcgataatcaccgccgccagcaagggtcccagggaactgccaaagttgccgccgacctgaaagatagattgcgccaggccatgccgcccgccggaagccatacgggccacgcgagaagattccggatgaaagacgctactaccggtaccgaccagcgccgccgccagcagaactgcgccaaaactgcccgccagcgcaagcagcaccagaccgcttaaggtaaagcacatgccaattggcaagctccatggcatcggatatttatcggtccagtagccgaccactggttgcagtaggctagaggcgagctggaaggtgagggttatcatgccaatctgcataaatgtcagagaaaattcactctgaagcagcggataaatcgccagaatcaggctttggatcatgtcgttcagcagatgactgaggctgatagcacctaaaataccaaagcttgttcgggccttggtcgtactcgcagccgcgcccgccacaggctggggttgttcactcattgccataggaaagtcactttttcagggttgcgatgtaaagaatgatcttatttgtgattattaccagactaacatacctgtatgcgtcgtctgaaggaagtctcaacgccgaatacagaatttctaatctggatgcagatttatcttcaccggacgcagacttgtctatgatgtcgcgtcatactatttttcaacacgttgaaatcaggtcagggagagaagtatgaaattattgcagcggggcgtggcgttagcgctgttaaccacatttacactggcgagtgaaactgctctggcgtatgagcaggataaaacctacaaaattacagttctgcataccaatgatcatcatgggcatttttggcgcaatgaatatggcgaatatggtctggcggcgcaaaaaacgctggtggatggtatccgcaaagaggttgcggctgaaggcggtagcgtgctgctactttccggtggcgacattaacactggcgtgcccgagtctgacttacaggatgccgaacctgattttcgcggtatgaatctggtgggctatgacgcgatggcgatcggtaatcatgaatttgataatccgctcaccgtattacgccagcaggaaaagtgggccaagttcccgttgctttccgcgaatatctaccagaaaagtactggcgagcgcctgtttaaaccgtgggcgctgtttaagcgtcaggatctgaaaattgccgttattgggctgacaaccgatgacacagcaaaaattggtaacccggaatacttcactgatatcgaatttcgtaagcccgccgatgaagcgaagctggtgattcaggagctgcaacagacagaaaagccagacattattatcgcggcgacccatatggggcattacgataatggtgagcacggctctaacgcaccgggcgatgtggagatggcacgcgcgctgcctgccggaagcctggcgatgatcgtcggtggtcacagccaagatccggtctgcatggcggcagaaaacaaaaaacaggtcgattacgtgccgggtacgccatgcaaaccagatcaacaaaacggcatctggattgtgcaggcgcatgagtggggcaaatacgtgggacgggctgattttgagtttcgtaatggcgaaatgaaaatggttaactaccagctgattccggtgaacctgaagaagaaagtgacctgggaagacgggaaaagcgagcgcgtgctttacactcctgaaatcgctgaaaaccagcaaatgatcagcctgttaagtccgttccagaacaaaggcaaagcgcagctggaagtgaaaataggcgaaaccaatggtcgtctggaaggcgatcgtgacaaagtgcgttttgtacagaccaatatggggcggttgattctggcagcccaaatggatcgcactggtgccgactttgcggtgatgagcggaggcggaattcgtgattctatcgaagcaggcgatatcagctataaaaacgtgctgaaagtgcagccattcggcaatgtggtggtgtatgccgacatgaccggtaaagaggtgattgattacctgaccgccgtcgcgcagatgaagccagatagtggtgcctacccgcaatttgccaacgttagctttgtggcgaaagacggcaaactgaacgaccttaaaatcaaaggcgaaccggtcgatccggcgaaaacttaccgtatggcgacattaaacttcaatgccaccggcggtgatggatatccgcgccttgataacaaaccgggctatgtgaataccggctttattgatgccgaagtgctgaaagcgtatatccagaaaagcagcccgctggatgtgagtgtttatgaaccgaaaggtgaggtgagctggcagtaatccgaaagtgccggatgtttgcatccggcacaatgcttaatcgcggcgggcgatatcagcaaatttggcatcgaggatctttgccagatcgcctgccgccagttcgatatccagtccgcgcttgccgccggaaacataaatagtggcaaattcttgtgcgggggcgtcgataatcgttggcagacgttttttctgccccagtgggctaatccccccaaccaggtatcccgtgctacgctgcgcgaccatcggatcggccatctcaactttcttggcacccagcgcttttgctacttttttaagatccagttgacctgcgaccggcgtaacggccacggcaaggtgtttcatatcaccgttcactgccaccagcagcgttttgtagacctgatccggattcaaacctaattttttgacgacttcatcgccaaaattggtttcagccggatcgtgctcgtaggtatggatttgaaagctaatcttgttttttcgagtaatttaactgcgggtgtcatggtaattttcctgccttaaacaaaaaaacgaagcaagcatacgcctgatggcggtccaaaaaaaagagtcatcttgcctaagagtattggcaggatggtgagattgagcgacaatcgagttacaccgtcgcttaaagtgacggcataataataaaaaaatgaaattcctctttgacgggccaatagcgatattggccatttttttagcgcaacatttgcggcaaattcccttctccatacaggtgtagtgcaccgaccgcgaccacatatcgccccggcggcatggcgcgtaatttatcccgccaggcgagatttcgctgatgcatcagcacatcgtacaggctctgactgaacgtattgggcagcgttatatcattattttgcggcggtgcattcagccaccagctcatcatttgttgcagcaaccgtgcgttggtatgccagtgggtcagcgtatcgtccagcagcgccagtcctttgtcagggagctggagcaacatggcaatctggttttcagccccttccagttcaatcacgggtttatgttgttgcttcgccgcctgcaatagctggtaatcgataccgtattctgcccgcagccccagtttttgtgcctgcgtcgcctgaagaaccatcgcgatttgccacagcggttgggtagaaaagagactgggagaaatgcccatctcctggctaatgtgctgcaggttttggagttgctcctcgctaatgcgctcttccagcgcctcgcaggcaggcaaattagcaaaaggcgtatcgctggtggaaacatccgcctcgacgatcagcgcatcggcgtttttgagctttttgagcaaacgggtgggcaggggagccatatcgtggctacccatatgaatactgccaatcagatgaaaatggcgattgccggggagggtgatatcgatggcaggccaggtgtaatgattaccgcgcagcgcggcccaaagcgtttttacccggtacaacagatccatacgacctccctttgtgaaatatcatgctagcgcgcggtgagggatggcgcaaatggagttggagacttgtttaatgtgtttgtatgattcagtatgttcttgcatcgctattcacaaggaagcaacagttaaaaaccatgaaacaggcaacaagaaaaccgacgacacccggagatattcttctctatgaatatctggaaccgctcgatttgaaaatcaatgagttagcagagttgctgcatgttcatcgtaatagcgtcagtgcactgatcaataacaatcgtaaactcactactgagatggcatttcgtctggcgaaagtttttgataccacagtcgatttttggctaaacctccaggcggcggttgatctttgggaagttgaaaacaacatgcgcacccaggaagaattgggacggattgaaacagtggctgaatatttggcacgccgtgaagagcgtgcaaaaaaggtcgcgtaaggccaaaacatcgcttcatctcgtaggccggataaggcgttcacgccgcatccggcatccgagcaccattgcctgatgcgacgcttacccgtcttatcaggcctacaaacttgtgcctgaaccgtaggccggataaggcgtttacgccgcatccggcatccgagcaccattgcctgatgcgacgcttacgcgtcttatcaggcctacaaacctgtgcctgaaccgtaggccggataaggcgtttacgccgcatccggcagtcatgcgtcgatgccaaatgcgccaccctaaagcagcgcatccgcaatgatgtacttattccttcggtttaaaccgcagcaaccggttggcgttactcactacggtaatgctgctgagcgccattgccgctccggcaactaccgggttaagcagtgttccagtgaacggccacaaaataccggcggcgaccggaataccgatactgttgtagataaacgcaccgagcaggttctgcttcatgttgtgcagcgttgcgcgggaaatagcgagcgcatccgcaacgcccatcaggctatggcgcatcagggtaatcgccgcggtttcaatggcaacatcactgccgccacccatcgcaatgccgacatccgcctgagccagcgctggcgcgtcgttaatgccgtcgcccaccattgccacctaacgtccttcactttgcagatgtttgatcgcttcggctttaccgtccggcagcaccccggcgatcacctcatcaatccctgcttctttggcgatcgcattggcggtggttgggttatccccggtcaacatcaccagacgatatcccgctttatgcaggcgttgcagcgccgccacgctatcactacgcaacggatcgcgtactgccagcagggctaccgctttcccgtcaaccgccagcagcacaggcgttgccccttggcttgcctgagcagtaatctccgcttcgatagctttggtaccaacctgttgctcatttaacagcgcctgattgcccagcaataacgcatgaccttcagcttcaccgctcacgcccagcccgcgcaatgtgcggaaaccgttgacctgcggtagctgcatatcacctgctttatcgaggatcgctcgtgccagcggatggctggaaccttgctccagtgccgccgccagacgcaatgcctgcgcttcatcaacatcagcaaatgttttcactgcgacaacctgcggcttcccttcagtcagcgtcccggttttatcgaacactacagtgtcgagtgtactggcgcgttgcagcgcgtcagcgtcccgcaccagcacgccaaactcagccgcccgcccgacgccggaaataatgctcatcggcgtcgccagccccagcgcacacggacaggcaataatcagtaccgtggtggcaatcaccagggtatagacaatctgcggtgccggaccaaagaaataccagattgccgcactgacaagcgcaataaccaccactaccggcacaaatacggcactgattttatccgccagctgaccgatttctggcttgctgctctgggcctggcgcaccatgcgaatgattcgactcagcgtagtatggctgccaaccgcactggcacgaaacagcacactgccgtcctgtaccactgtcccggcatggacgctatcgccttcgcctttttgctgcgggattggttcgcccgtcagcatcgcttcatccagccatgcttcgccctgggtaatctcgccatctaccggcacgcgatcgccggtcgtcaggcgcagcaacatacctggctgcacttctgccagaggcacgcttttttcaccttcgtcagtaaccaggcgtgccgtcggcggggttaaatcgagtaacttttccagcgccttagaagaacgctggcgtgcgcgcgcttccagcatatggccgagattgatcagaccgataatcatcgcgctggcttcgtaataaagatgtcgcgcttccatcgggaaccactgcggccacaggttgacgctcatgctatagagccacgccacgccagtacccagcgccaccagcgtatccatcgtcgccgcaccgttcagcaggcttttccatgcactgcggtaaaaatggccgccggcgaaaaccatcactgccagggttatcaggccgataaccaaccacaggctgcggttgtcagcggtgaccatcatgttatcgccgatcatcccccagaccatcaccgggatacccaccgccagtgcgacaattgcctgccagcggaagcgcttcatcgtagcgacggcggtttcttgctggcgctcgcggcgtttagcgtcatcttcaatcgcttccgcgccgtagcccgctttttccaccgcctgcactaaatcttgtggggaggcactgcccatcaccagcgcagtacgctccgccaggtttacccgtgcctgagtgacgcccggtacgctttgcagcgcattttgtacgcgggtgacacagctggcgcagctcatgccgctcagcagcaactgctggctgtcatcgtcatcggcggtcgctgccggaagcgcctcagaaaccgctgtcagtgcttcgctcgggatactactctccgccagcggtttagcctttgggtggcttacagatgcgtcataacccgcttgtttgatggtttcgatcagctgttctgcactggcagtcccggtaacgtgcgcttcagtgatagacacatccgcctgctcaacatccggacgctgttcaagactttctttcacgcgtttaacgcagtgaccgcaggacaggccgtccagggtcaggtcgatagtttgactcataaaacactcctttaagacagttttgactggctgtgataaaggttaaaccttccagcaaggggaaggtcaagaaattaataaaccaggcgggtaaaagtccgtaaagattaaaaaatcggctcgatttgcatcaggattagacatttatctctttgttttcctgtagttaagttgcgggtgctaagttaaatcaggatgcctgaaaatcggcaccggggtgaggaattacctcccgcatctataaaaaggagttaacaaaagatgttagatgcaaacaaattacagcaggcagtggatcaggcttacacccaatttcacagtcttaacggcggacaaaatgccgattacattccctttctggcgaatgtaccaggtcaactggcggcagtggctatcgtgacctgcgatggcaacgtctatagtgcgggtgacagtgattaccgctttgcactggaatccatcagcaaagtctgtacgttagcccttgcgttagaagatgtcggcccgcaggcggtacaggacaaaattggcgctgacccgaccggattgccctttaacagtgttatcgccttagagttgcatggcggcaaaccgcttagcccactggtaaatgctggcgctattgccaccaccagcctgattaacgctgaaaatgttgaacaacgctggcagcgaattttacatatccaacagcaactggctggcgagcaggtagcgctctctgacgaagtcaaccagagcgaacaaacaaccaacttccataaccgggccatagcctggctgctgtactccgccggatatctctattgtgatgcaatggaagcctgtgacgtgtatacccgtcagtgctccacgctcctcaatactattgaactggcaacgcttggcgcgacgctggcggcaggtggtgtgaatccgttgacgcataaacgcgttcttcaggccgacaacgtgccgtacattctggccgaaatgatgatggaagggctgtatggtcgctccggtgactgggcgtatcgtgttggtttaccgggcaaaagcggtgtaggtggcggtattctggcggtcgtccctggagtgatgggaattgccgcgttcagtccaccgctggacgaagatggcaacagtgttcgcggtcaaaaaatggtggcaagcgtcgctaagcaactcggctataacgtgtttaagggctgatcatgatgaacacggaaggtaataacggtaacaaacctctcggtctatggaacgtcgtttccatcggcattggggcaatggtgggggcggggatcttcgcgctgctggggcaggctgcattgctaatggaagccagcacctgggtcgcctttgcttttggcggtattgtggcgatgttttccggttatgcctatgcgcgtctgggggcgagctatcccagcaatggcggcattatcgacttctttcgtcgcggattaggcaacggcgtctttagcctggcgctcagcttactgtacctgttgacgctggcggtgagcatcgccatggtcgcccgtgcttttggcgcttatgccgtgcagtttttgcatgaaggcagccaggaggagcaccttattttgctctacgcgttggggatcattgcggtgatgacgcttttcaactccttaagcaaccatgcggtagggcggctggaagtgatcctcgtcggcattaaaatgatgatcctgttattgctgattattgccggtgtctggagcctgcaaccggcgcatatttccgtctctgcgccccccagctccggtgcgttcttctcctgtattgggataactttccttgcctatgcgggctttggcatgatggcgaacgcggcggataaagtgaaagatccgcaggtcattatgccacgggcgtttctggtggcgattggcgttaccacgttgctttatatcagcctggcactggttttgcttagcgatgtaagcgcattagagttagaaaaatatgccgataccgccgtagcgcaggctgcttctccgctgctcgggcatgtgggttatgtgatcgtcgtcatcggcgctttactggcgacggctagtgccattaacgcgaacctgttcgccgtgtttaacatcatggacaacatgggcagcgaacgcgaactgccgaagctaatgaataaatccctgtggcggcagagtacctggggcaacattattgtcgtggtgttgattatgctgatgacggcggcactgaatttaggcagtctcgccagcgttgccagcgccacctttttgatttgctacctggcggtgtttgtggtggcgatccgcctgcgtcatgatattcacgccagcttgccgattcttatcgttggtacgttggtgatgttgttggtgatcgttggctttatctacagtctgtggtcccagggtagccgtgcgttgatatggattattggcagtctcttactcagccttattgtggcaatggtcatgaagcgcaataaaaccgtataacatctctctgtgcgcagtacttcctgtattattgtggtggcggtcgatattcgcactggcaaaaaaacgtgcttgaatatctgttgaaaccctttaacaaagcacaggaggcgttgcgcgaacgatgaacatcagcgatgtagcaaaaattaccggcctgaccagcaaagccattcgcttctatgaagagaaggggctggtgacgccgccgatgcgcagcgaaaacggttatcgcacctacacgcagcagcatctcaacgaactgaccttactgcgccaggcacggcaggtgggctttaacctggaagagagcggcgagctggtgaatctgtttaacgacccgcagcggcacagcgccgacgtcaaacggcgcacgctggagaaggtggcggagaacgaacgacacattgaggagctgcaatccatgcgcgaccagctgctggcactggcgaatgcctgccctggcgatgacagcgccgactgcccgattatcgaaaatctctccggctgctgtcatcatcgggcagggtgattaagagctgacggctcggatatgtagggttatcccttctatcgcaatgacttcaacatgcgtacctgcaccgagatcctcgctggcgctgacaggccaactactgtcaccgacgcgcatatgaccgcgcccgttgaccagcggagattccagcacaaaacgtcggccaatcagctgctgcccgcgctggtttaaatgactatcgctgtgcttttgttcgcgcacccgccggctcaaccatttccaccacagccaggcggcgagcagcgtcaggatggcaaacattaccccttgccactcccaacccagcggcaccagccagaccaccaggccggtaatcaccgctgccacgccgctccacaacaaataaccatttccgcccagcatctcggctgccagcagcaaaccgccgagactgagccagaaaatatgtggatgaacgaccattaactccatcatggctgagtccgtttgttggcgctgtctttcaccagctcggcaatcccggcaatgctccccatcaggctgctggcctctaatggcatcatcactactttgctgttactggaggaaccgatctgctgtaacgcttcggtgtatttctgcgctacgaagtagttcaccgcctgaatatcaccggaggcgatagcttcagacaccattttggtggcgcgggcttctgcttcggcggaacgttcacgcgcttcagcctgtaaaaacgcgctctgacgttcgccttccgctttcaggatttggctctgtttttcaccttcggctttgaggatttccgcctgacggatcccttccgcttcaagaatgtaagcgcgtttggtacgttccgctttcatctgcgcgttcatactagagataagctctgccggtgggcgcacgtcgcgaatttcaatacgggtgactttaatcccccacgggttggtggcttcatcgacaatacgcagcaggcgactgttgatgctgtcgcgctgagagagcatttcgtcaagttccatactacccagcacggtacggatgttagtcatggtcaggttgatgatcgccagctccagattgctgacttcataagccgcgcgcggcgcgtcaatcacctgaataaagcacacggcgtcgatggtaacgttggcgttatctttgctgataacttcctgggaagggatatcgagcacttgctccatcatattgatcttgcgaccaatgcgatccataaacggcaccaccagactgagccccggctgtaacgttttggtatagcgaccaaagcgttctactgtccactgatagccctgcggtacgattttgacacccgcgccgacaatgaccagcgcgacaaaaatgagaatcgggataaagataagcatcggaaaaacctcctgttgtaccgtccataatcagcaaaattgctgcttgattaaacaaattatacctgattactgaaagagagttcccccttattcctgcgaaggataaactgtttttagtaaaaatcagaaaaagggaacagcgatgcaggaaaatagtcctttgcttcagctacaaaacgtaggatatctggcgggtgatgcgaagattcttaataacatcaattttagcctgcgtgctggcgaatttaagttaattaccggtccttctggttgtggcaaaagtacgctgctaaaaatagttgctagtttgatcagcccaaccagcggaacgttactgtttgaaggtgaggatgtcagcacactaaagccagaaatctaccgccaacaagtctcttactgcgcccagacaccgacgctgtttggcgatacggtatacgataatctgatctttccctggcagatccgtaaccggcagcctgacccagccatttttctcgattttctcgaacgcttcgccttgccggacagcattttgacgaagaatatcgccgagctatctggtggtgaaaaacaacgcatcagtttgattcgtaacctgcaatttatgccgaaggttttattgctggatgaaataaccagtgcgctggatgaaagtaataaacataacgtcaatgagatgatccatcgttatgtgcgcgagcaaaatattgccgtgctgtgggtgacacacgataaagacgaaattaatcatgcggataaagtgattacactgcaaccgcatgccggagaaatgcaggaagcacgctatgaactcgcataactaaagaaatgcaggaagcacgctatgaacagccataatattactaacgaaagtttagcactggcattaatgctggtggtggtggcaatcttaattagccataaagaaaaactggcgctggagaaaaatattctctggagcgtcgggcgagcgataattcagctgattattgtcggctatgtgctgaagtatattttcagcgtggatgatgccagcctgacattattgatggtgttatttatctgctttaatgcggcgtggaacgcgcaaaaacgcagtaaatatattgctaaagcttttatcagtagctttattgccattacggtcggggcgggaattaccctggcggtgctgattctcagtgggagcattgaatttatcccgatgcaggtgatccctatcgccgggatgattgccggtaacgccatggtagcggtggggttgtgttacaacaatttagggcaacgggtcattagcgaacagcaacagattcaggagaaactgagtcttggtgcgacgccgaagcaggctagtgcgatattgattcgcgacagtattcgcgcggctttaattccgacggtcgatagtgcaaaaacggttggcttagtgagtttaccaggaatgatgtccgggctgatatttgccgggattgatccggtgaaggcgattaaatatcagattatggtgacctttatgctgctcagtaccgccagcttgagcaccattattgcctgctatttaacctatcgtaagttttataatagccgccaccagttggtggtgacgcaattgaagaagaaatgatgcgatgccggatgcgcagcatcgcatccggcgttgtggttcatgtgccgatcaacggaatatcaatacaacaatgcatacagctggcggcgatacttgctcgccagtgcatcacccgtacccagcgcagcgaggatctcctggaacgttttacgcgtctgaccgtctgcggcggtgagatctttacgcagatgcccgaacagcaactccagcgcctcttcattgcgcccaacctgatgcagttgcagcgccagttgcgtcgccagtgcggcatcttctggattctccgccacctgctgttgcaactgttgaatttccggcgtatcagccgcctgcttcagcagttcgatttgcgccaccagcccctggtagcgggtgtcctgatcctgcaacggaatggttttcagcaccgcttccgcatcttcagaacggttcagcgcaatcagcgtttctgccagcagcaggccgatctccccgttctgattgctcaactgccaggcgtctttcagcaatggcagggcatcggtgtaattgctttcctgcatcagttgcatcgcctgctgcgctttcagctcttcttcgcgcggcagcactttatccagcagggcgcggatcgcctcttccggttgcggcccctggaagccatctaccggttgcccgttctggaacagatacacggtcggaatcgcacgcagaccaaactgcgcggcaatcatctgctccgcgtcgcagtccagcttcgccagaataaattgcccgttgtactgcgccgcgaggctttccagaattggggttaactgcaaacagtgctggctacgttcagaccaaaaatagaacagcaccggagtggtcatgctctgttcaagaacctgttgcaggttagattcgttaatgttgacaatattttctacggacatggagtcgctctctgttgtcgatattttctttgacatgggggcttaagcgcgcgcttcaactcacccctgcaatattttgtccatcacgcgccccggcagcaggcgcttaagcaccattaccgcccaggtcaccagcgtcaccggatagcgcatcttcggcttctcgctaataaaagcatggcgtactttgtccaccaccgcttccggtcccaacgtaaagcgggcggcgatgccgggattttcgactggtttatcactttgcgtctggttgacgttgtcggtgaagcgagtacgaatgggaccgggttcgatcaggctgactttaattccgctgtggcgcagctccatgcgcagtgcatcactccacgcctccagcgcatatttactggccgcgtaagcgccacgacccggcgtggagattaatcccatcacgctacttgtcatcacaatacgcccttcaccgtgcggtaacatcgcgggtaacaggcgcatggtgagctggtgtgcgccgaaaaagttggcggaaaactgctgttccatctgcgcacggctgatggtggaaagggggccatacatgccgaatccggcattgttaaagatcccatacagacaattatcggtcagggcgatcacctcgtcggctgcgcgatcaacactttctggactatccagatcgatcaacacgccggtaaatcccatgctgttcatgcgctcaacatcatccggtttccggcaacctgccagcacatgaaaaccctggcgttttaattcgagcgcgctttccaggccaattccactggaacatccggtaattaagacgcttttttgcataactttacctgtcaggatctccgttgctttatgagtcatgatttactaaaggctgcaacttatttaactgtcatgatttactaaaggctgcaactgcttcgccatccagtcggcaataaacggctgggcgtcgcggttgggatgaataccgtcatcctgcatccattgtggcttgaggtagacctcttccataaaaaagggcagcagcggaacatcaaactctttggcgagtttggggtaaatggcgctaaaggcttcattataacggcgaccatagtttgcaggcagacgtatttgcattaacaatggttcagcgttggcggctttgacatcctgcaaaatctggcgcagcgtttgctcggtttgctgtggctgaaaaccacgcaaaccgtcattgccgcccagttcaaccagcacccaacgcggctgatgctgtttcagcagagccggaaggcgcgccagtccttgttggctggtgtcgccgctgatgctggcattaactacgctcgttttactctgccacttatcattcaacaaggcaggccaggccgcgctggcagacattcgatacccggcgctcaggctatcacccagaatcaataacgtgtccgctgcggcggcacggaaggttaacaggaccaggaacaggaagggcaaatgccagcggaaaacattgttgaagttcatcatcttaagaagtccgtcggtcagggggagcatgaactctccatcctcaccggagttgagctggttgtcaaacgtggcgagaccatcgcactggtgggcgagagcggaagcggtaagagtaccttgctggcgatcctcgccgggcttgatgacggcagcagtggcgaagtgagtctggtgggacaaccgctacataatatggacgaagaagcgcgggcaaagttgcgcgcgaagcacgtcggctttgtttttcagagttttatgttaattcctacccttaacgcgctggaaaacgtcgagcttccggctctgctgcgcggtgagagtagcgcggaaagtcgtaacggggcgaaagcgttgctcgaacagttagggctgggtaaacgtctggatcatcttccggcacagctttccggcggtgaacagcaacgagtggcgctggcacgagcctttaatggtcgacctgatgtgctgtttgccgacgaacccaccggcaaccttgaccgccagacgggcgataaaattgccgacctgctgttttccctcaaccgtgaacatggcaccacgttgattatggtgacccacgacctgcaactggcggcacgctgcgaccgctgcttacggctggtgaacgggcagttgcaggaggaagcatgattgcacgttggttctggcgcgaatggcgtagcccgagcctattaattgtctggctggcgctaagcctggcggtggcctgcgtgctggcgctgggcaatatcagcgatcgcatggagaagggcttaagccagcaaagccgtgagtttatggcgggcgatcgggcgttgcgcagtagtcgcgaagtgccgcaagcgtggctggaggaagcgcaaaagcgcggcctgaaagtcggcaagcagctgactttcgccacaatgacctttgcaggcgacacaccgcagctggcgaacgtcaaagcggtggatgatatctacccgatgtatggcgatctgcaaactaatccccctggcctgaaaccgcaggcgggcagcgtattgctggccccacgcctgatggcactgcttaacctgaaaacgggcgacaccattgacgtgggcgatgccaccttgcggattgccggagaagtgattcaggaaccggattccggttttaaccccttccagatggctccgcgtctgatgatgaatctggcggatgtcgataaaaccggagccgtgcagccggggagtcgggtcacctggcgttataaattcggcggcaacgagaaccagctcgacggctatgagaaatggttgttacctcagcttaaacccgaacaacgctggtacggtctggaacaggacgaaggcgcgctggggcgaagcatggaacgcagccaacagttcctgctgcttagcgcgcttctgaccttgctgctggcagtggcagcggtggcggtagcgatgaatcattactgtcgcagtcgctacgatctggtggcgatcctcaaaacgctgggggcagggcgagcgcaactgcgtaagctaatcgtcggtcagtggttgatggtgctgacgcttagtgccgttaccggtggggccataggcctgttgttcgaaaacgtgttgatggtgctgctcaagcccgttctgcctgctgcactaccgccagccagcctctggccgtggctgtgggcgcttggcaccatgacggtcatcagcctgctggtggggctacgaccatatcgcttgttgctggcaacgcagcctttacgcgtattacgtaatgatgtggtagcgaacgtctggccgctgaagttttatctgccgattgtcagtgtggtggttgtgctgctgctcgccggattaatgggtggcagcatgctgctttgggcggtgctggcgggcgcggtagtactggctttgctgtgcggtgtgctgggctggatgctgctgaatgtacttcgccgcatgacgctgaaaagcctgcctctgcgcctggcggttagccgcctgttacgtcagccgtggagtacgttaagtcagcttagcgcatttagcctctcctttatgctgctggcactgctgctggtgttgcgtggcgatctgctcgaccgctggcagcagcagctacctccagaaagcccgaactactttttaattaacatcgccacagaacaggtagcaccgctaaaagcgttcctcgcggaacatcagatagtcccggaaagcttttatccggtggtgcgggcgcggctgacggcgattaacgataagccgacagaaggtaatgaagatgaggcgcttaaccgcgaactcaatcttacctggcaaaatacgcggcccgatcataatccgattgtcgccggtaactggccgccaaaagccgatgaagtgagcatggaagaggggctggcgaaacgcttaaacgttgccctcggtgataccgtgacttttatgggcgatacccaggagttccgcgctaaagtgaccagcctgcgcaaagtggactgggaaagtctgcggcctaatttctattttattttccctgaaggggcattagacgggcaaccgcagagctggcttaccagtttccgctgggagaatggcaacggcatgttgacacaactcaaccgccagttcccgaccattagcctgttagatattggcgcgattttaaaacaggtcggtcaggtgctggagcaggtaagtcgggcgctggaagtgatggtggtactggtcaccgcctgcggtatgttgctgttgctggcacaggtgcaggtgggaatgcgtcagcgtcatcaggagctggtggtgtggcgcacactcggtgcggggaaaaaactgctgcgtaccacgttgtggtgtgagttcgccatgcttgggtttgtttccggcctggtggccgcaattggtgcggaaacggcgctggcagtgttgcaggcgaaagtgtttgattttccgtgggagccagactggcgattgtggattgttctgccgtgcagcggagcgctgctgctgagccttttcggcggctggctgggtgcgcgactggttaagggtaaggcgctgttcaggcagtttgcggggtgatgagagtccctcattaccgcgccttaacccattccgccacttccgcccactcaccgcgaaagacaactttttccgcttttttctcaagctgatagcgatacatcgggtcgtaatattcttcaagtaacggcaccagccaggccagatgaccgtcggtgctgccggtggtgagttgcgttgtcagtgctgcatccagccttgcagccagttcgttatagcgctgtagccccagccgacgcttaatcgcgctaagtccgtgatgcaggtattcgcaatactcctgccagccctgttcgtcgccgtacgcgtgggtaaaatcatgatgcatacgcaagaaatactcttcgttcaggcgctcaagacggatctcaaacggatcttctaccaccgcaatcgccgcctgagtcattcgctcgcgcaggcattccggcaggtgattgctaccgatcatccggctttcgtcttccagcacccacaggcgcaaattctgacgggcgtcggtttttagcatttcggcagccagcaggttttcaaaactcgcctggctaagttgtggttgtaacgtgcgaccaaacgcgctaccgcgatgacgcgccaacccttccagatcaacaccgttcggctgttgctgcactaacagcgttttaccgctgccggtacaaccgccaatcagcactatcggtttttgtgccagttcaatagtcgcctgaatcgcggtctggcgcagtgccttataaccgccttccaccagcggataatcaatccccgctgcatgcaaccagctttacacaatatgactgcgctgaccgccacgggcgcagcagagaataccttgcggattttgcaggcacgctgcccgccaggcgtccatgcgctgctgacgaatttcacccgccaccagtttatgtcccagcgccagcgctgcgtcactgccttgctgtttatagcaggtgccaacggcggcgcgttcatcgttattcattaacggcagattgatagcggcgggcattgcgccgtgctcaaactcgataggggcgcgaacatcaataatgggcgtatcagcaatcagcagggcacgatagtcctgttccgtgtgtctctcttgcatagttaaaagtgaacctcaaatcagcttgcgcgctattttacgcgccaacgcgcaaggaaacttgatttttaactgcgtgggttgccgaaaatttctaaaaatccgctgatttccggcctgcgctgggtaaacaaggtcacaatatcttctaccgctttgccgctgccaaatttgcgccatgccagactcaatgggctaggagggcgcatcgttgggattacccggctgaccagttgttgattatcgatcatactctggcaaaggctttttggcaaaaaaccaatgccaacgcccgccagatgggcggcgattttcgtttccatatcgggaacaataatctctttttgccctggcaatcgccaggcgacgcgtttggttaaggtgcgggcgctgtcttcaatattgaccgccggaaagcgccgcaactgcgcttctgttagcggctcttcaacgttcgccagcggatgatccgccgccatgacaaagcgccattgcacgcttcctaagggatcaagactaaaggtatttgccagcgcctcagttcccgtgacgccgatagccaggctaaaaccttcgtacaataggctgtcccagacgcccatatagatttgtcgggagatgtgaaactgggtaaaggggtaacgctcattcagccacgccagcaactgggcgacggcctgggggttatagagcaggttgttgatgacaatattcacctggcgttccacgccatcattcacctgttgcagctcgcttggcatactttccagccagctcagccagtctctggcctgggaaagtagatgctcgccagccgctgtcaacgtcacgctgcgagtcgtacggaaaaacagcgctactccggtattctcttccagaagtttaatgcgataactgatcgtcgccgtggttttacataatcgttctgccgctttactaaaacttcctgtttcagcaaccgcaatgaaagtccgcaaggtttctggatcgaacatcttcaggtatccccttttaaatccgcaagttgcgtgattttcttatcctctgatttatcagtatttttacatgataaccctgttcaatttgtggactaaatctagttttggaaaaatattccaacttttgtattgatgttgttctcttaaggttttagattgcctgttattgaaaccaagctgaccggtcggcggtggttgaacggaattatgttacaaggacaaaaagatgaaacttcaggtattaccgttaagtcaggaagcctttagtgcttatggcgacgtaatcgaaacgcagcaacgggattttttccatattaacaatggcctggtggagcgttaccacgatttggcgctggttgagattcttgagcaagactgtacgcttatcagcattaaccgcgcgcaaccggcgaatctgccgctgaccattcacgaactcgaacgtcatccgctgggtactcaggcctttatcccgatgaaaggtgaggtgtttgtggtggtcgtggcgttaggtgacgacaaaccagacctgagtacgctgcgggcgtttatcaccaacggcgaacagggagtgaattaccatcgtaacgtctggcatcacccacttttcgcctggcagcgcgtcaccgattttctgaccatcgatcgcggcggcagtgacaactgtgatgttgaaagtattcctgaacaggaactctgttttgcgtgacgcctgcaaccgacttgcataagataaactaattgttcattgtttatgctcacttgtaggtcggagttaacgtaggtatgacggaagttagacggcgcggcaggccaggacaggcggagcctgtggcacagaagggcgcacaggcgttagagcggggaattgcgattctgcaatatttggaaaaaagtgggggaagtagcagcgttagcgatatttctctcaatctggatttgccgctctccacgacctttcgcttgctgaaggttttacaggcagcggattttgtctatcaggacagtcaattaggctggtggcatataggattaggtgtctttaacgtcggtgcggcgtacatccataaccgcgatgtcctctccgtcgccgggccgtttatgcgccgcctgatgttactttccggcgaaacggtcaatgtcgcgatccgtaacggcaatgaagcggtattaattggtcagttagagtgtaaaagcatggtcaggatgtgtgcgccactgggcagtcgtctgccactgcatgcttccggtgcgggcaaagcgctgctttatccgctggcggaagaggagttgatgagcatcattctgcaaaccggtttgcagcagtttacgccaactacgcttgtggatatgcccaccttgctgaaggacctggaacaagcgcgtgaactgggctataccgtagataaagaagagcatgttgtaggtctgaattgcatagctagtgcaatttacgatgatgtcggtagtgttgttgccgctatctccatctccgggcctagtagtagactgacagaagatcgttttgtcagtcagggtgagctggtcagagacaccgcccgcgatatcagcacggcgttgggactgaaagcacatccataatgtctgtcgcatcccgctctgcggagcgggtttttttgacaaaatttgaaagttggaaaaattttccaataaatagaggtaggaataaaatggcaaaaatgagagccgttgacgcggcaatgtatgtgctggagaaagaaggtatcactaccgccttcggtgttccgggagctgcaatcaatccgttctacagtgcgatgcgtaagcacggcggtattcgtcacattctggcgcgtcatgtggaaggtgctagccacatggcggaaggttatacccgcgcaacggcagggaatatcggcgtatgtctggggacttccggtcctgcgggcacggacatgatcaccgcgctctattccgcttctgctgattccattcctattctgtgcattaccggccaggcaccgcgcgcccgtctgcataaagaagattttcaggccgtagatattgaagcaattgctaaaccggtcagcaaaatggcggttacagttcgtgaagcggcgctggtgcctcgcgtgctgcaacaggcatttcacctgatgcgttctggtcgtccgggtccggtactggtggatttaccgttcgacgttcaggttgcggaaatcgagtttgatcctgacatgtacgaaccgctgccggtctacaaacctgctgccagccgtatgcagatcgaaaaagctgtagaaatgttaatccaggccgaacgtccggtgattgttgccgggggcggggtaattaatgctgacgcagctgcactgttacaacagtttgctgaactgaccagcgttccggtgatcccaacgctaatgggctggggctgtatcccggacgatcatgaactgatggccgggatggtgggtctgcaaaccgcgcatcgttacggtaacgcaacgctgctggcgtctgacatggtgtttggtatcggtaaccgttttgctaaccgtcataccggcagcgtagagaaatacaccgaagggcgcaaaatcgttcatattgatattgagccgacgcaaattggtcgcgtgctgtgtccggatctcggtattgtctctgatgctaaagcggcgctgacactgctggttgaagtggcgcaggagatgcaaaaagcgggtcgtctgccgtgtcgtaaagaatgggtcgccgactgccagcagcgtaaacgcactttgctgcgcaaaacccacttcgacaacgtgccggtgaaaccgcagcgcgtgtatgaagagatgaacaaagcctttggtcgcgatgtttgttatgtcaccaccattggtctgagtcaaatcgctgcggcacaaatgctgcatgtctttaaagaccgccactggatcaactgtggtcaggctggtccgttaggctggacgattccggctgcgctaggggtttgtgccgctgatccgaaacgcaatgtggtggcgatttctggcgactttgacttccagttcctgattgaagagttagctgttggcgcgcagttcaacattccgtacatccatgtgctggtcaacaacgcttatctggggctgattcgtcagagtcaacgcgcttttgacatggactactgcgtgcaactcgctttcgagaatatcaactccagtgaagtgaatggctacggtgttgaccacgtaaaagtagcggaaggtttaggttgtaaagctattcgggtcttcaaaccggaagatattgcgccagcctttgaacaggcgaaagccttaatggcgcaatatcgggtaccggtagtcgtggaagttattctcgagcgtgtgaccaatattagcatgggcagcgaactggataacgtcatggaatttgaagatatcgccgataacgcagcggacgcaccgactgaaacctgcttcatgcactatgaataagggagataaataatgttacgtttctctgctaatttaagcatgttatttggagaatatgattttctcgcccgttttgagaaagctgcgcagtgtggttttcgcggcgttgaatttatgtttccttatgactacgacattgaagaattaaaacatgtgctggcgagtaataaactcgaacatacgctgcacaatttaccggcgggtgactgggcggcgggggagcgcggtattgcctgtattcctggccgtgaagaagagtttcgggatggcgtagcagcagcgattcgttatgcccgtgcgctgggtaataaaaaaattaactgtctggtcggtaaaacgccggctggtttcagcagtgaacagattcacgcaacgcttgtagaaaacctgcgttatgccgcgaatatgctgatgaaagaagatattttattactgattgaacctattaaccattttgatattcctggtttccatctcaccggaactcggcaggcgctgaaattgattgatgatgttggttgctgcaatttgaaaattcagtatgacatttatcatatgcagcggatggaaggtgaattaaccaacaccatgactcagtgggctgataaaattggtcacctgcaaattgccgataatccgcatcgcggcgaaccgggaaccggagaaattaattatgattatctctttaaggtaatcgaaaattctgactacaacggttgggttgggtgtgaatataaaccccaaaccaccacggaagccggtttacgctggatggatccgtaccgttaaaacgtaacgctattcagacaatgcttttttaggccgctaagttggcaggggatcgtgttgtctgaattcaggaaaagcgaaatttaaaagaggttaattatgaaactgggatttattggcttaggcattatgggtacaccgatggccattaatctggcgcgtgccggtcatcaattacatgtcacgaccattggaccggttgctgatgaattactgagtctgggtgccgtcagtgttgaaactgctcgccaggtaacggaagcaagcgacatcatttttattatggtgccggacacacctcaggttgaagaagttctgttcggtgaaaatggttgtaccaaagccagcctgaagggcaaaaccattgttgatatgagctccatttccccgattgaaactaagcgtttcgctcgtcaggtgaatgaactgggcggcgattatctcgatgcgccagtctccggcggtgaaatcggtgcgcgtgaagggacgttgagcattatggttggcggtgatgaagcggtatttgaacgtgttaaaccgctgtttgaactgctcggtaaaaatatcaccctcgtgggcggtaacggcgatggtcaaacctgcaaagtggcaaatcagattatcgtggcgctcaatattgaagcggtttctgaagccctgctatttgctagtaaagccggtgcggacccggtacgtgtgcgccaggcgctgatgggcggctttgcttccagtcgtattctggaagttcatggcgagcgtatgattaaacgcacctttaatccgggcttcaaaatcgctctgcaccagaaagatctcaacctggcactgcaaagtgcgaaagcacttgcgctgaacctgccaaacactgcgacctgccaggagttatttaatacctgtgcggcaaacggtggcagccagttggatcactctgcgttagtgcaggcgctggaattaatggctaaccataaactggcctgatacccgcaataaaaatggccgatatcagaaaatgaatcggccagcaatattaaaaaagaaagcagccaaagatgttgctagtgtattaaaaataatatttttattttatttgttcctcatagctagattaaaacaacgttatagcatacgtgaaattaagagggatttatggaacatcagagaaaactattccagcaacgcggctatagcgaagatctattgccgaaaacgcaaagccagcggacctggaaaacatttaactattttaccttatggatgggtagcgttcataacgttcccaattatgtgatggtcggcggcttttttattctcggcttgtctacctttagtattatgctggcaattatcctcagcgcctttttcattgccgcggtaatggtattaaacggtgctgcgggcagtaaatacggtgtgccttttgccatgatcctgcgtgcttcttacggtgtacgtggtgcactgtttcccggattattaaggggcggaattgccgccatcatgtggtttggtttgcaatgttacgcggggagtctggcctgcttgattctgattggcaaaatctggccgggatttttaactctcggtggtgatttcactctgttaggcctttctctaccgggcttaattactttcttaatcttctggctggtcaacgttggtataggttttggcggtggcaaagttttaaataaattcactgccattcttaacccgtgcatctatatcgttttcggcggtatggcgatttgggcgattagtctggtcgggatcggtccaatctttgactacattccgagcggtattcagaaagcagaaaacggtggcttcctgttcctggtggtgattaacgcggtagttgcggtctgggcggcaccggcggtgagcgcatccgactttacgcaaaacgcccacagctttcgtgagcaggcgctggggcaaacgctgggtttagttgtggcctatattctgtttgcggtcgccggggtatgtattattgccggagccagtattcactacggcgctgatacctggaacgtgctggatattgttcagcgttgggacagcctgttcgccagcttctttgcggtactggttattctgatgacaactatctccactaacgcgaccggtaatattattccagccggttatcagattgccgccattgcaccgacaaaactgacctataaaaacggcgtactgattgccagtattatcagcttgctgatctgcccgtggaaattaatggaaaatcaggacagcatttatcttttcctcgatattatcggcggaatgcttggtccggtaattggtgtcatgatggcgcattattttgtggtgatgcgcggacaaattaatcttgatgaactgtataccgcacctggcgattataaatattacgataacggttttaacctcactgcgtttagtgtaactctggtggccgttattttatctcttggcggtaagtttattcactttatggaaccgttaagccgtgttagttggtttgtcggcgtcatcgtcgcctttgcggcctacgccttattaaagaaacgtacaacagcagaaaaaacaggagagcaaaaaaccataggttaattaatcccgatattgaacattgagttaaaaaccaatctgtattttacaaggagtttgttatgtcttttgatttaatcattaaaaacggcaccgttattttagaaaacgaagctcgcgttgtagatatcgccgttaaaggcggaaaaattgctgctatcggtcaggatctgggcgatgcaaaagaagttatggatgcgtctggtctggtggttagcccgggcatggttgatgcgcacacccatatttctgaaccgggtcgtagccactgggaaggttatgaaaccggtactcgcgcagcggcaaaaggtggtatcaccaccatgatcgaaatgccgctcaaccagctgcctgcaacggttgaccgcgctagtattgaactgaagttcgatgccgctaaaggcaagctgactattgatgcggcacaactcggtggcctggtgtcttacaacatcgaccgtctgcatgagctggatgaagtgggcgttgtcggcttcaaatgcttcgttgcgacctgtggcgatcgcggtatcgacaacgacttccgtgatgtaaacgactggcagttcttcaaaggtgcgcagaagctgggcgaactgggtcagccggtgctggtgcactgcgaaaacgcgctgatttgtgacgaactgggcgaagaagcgaagcgtgaaggtcgcgtaaccgctcatgactatgtggctagccgtccggtatttaccgaagtggaagcaattcgccgcgtactgtatctggcgaaagttgctggttgccgtctgcacgtttgccacgtcagcagcccggaaggtgttgaggaagtgactcgtgcacgtcaggaaggtcaggacgttacttgtgaatcctgcccgcattactttgtactggataccgatcagttcgaagaaatcggtactctggcgaagtgtagtccgccgatccgcgatctggaaaaccagaaaggcatgtgggaaaaactgtttaacggtgaaatcgactgcctggtttccgaccactctccatgcccgccggaaatgaaagccggtaacatcatgaaagcatggggcggtatcgccggtctgcaaagctgcatggacgtgatgttcgatgaagcggtacagaaacgcggtatgtctctgccaatgttcggcaaattaatggcgactaacgcagcagatattttcggtctgcagcaaaaaggccgtatcgccccaggaaaagatgccgacttcgtcttcattcagccgaatagcagctatgttcttaccaatgacgatctggaatatcgccacaaagtcagcccgtatgttggccgtaccattggcgcgcgtatcacgaaaaccatcttacgtggtgatgtgatttacgacattgaacagggcttccctgttgcgccgaaaggtcaatttatccttaaacatcagcagtaatctggcccctgcaatgcccgtccttgcggcgggcattctccggttaaggtgtgtttatgttcaattttgcagtcagccgcgaaagcctgttaagtggatttcagtggtttttctttattttttgcaacacggttgtggttcctcctacgctactttctgcttttcagttgccgcaaagtagcctgcttacgctcacgcaatatgcttttcttgctaccgcactggcctgcttcgctcaggcgttttgcggtcatcgtcgcgctattatggaagggccaggtggcctgtggtggggaaccatccttactatcacccttggtgaagcaagccgcgggacaccgatcaacgatatcgccaccagcctggcagtggggattgcactctccggcgtgctgacgatgttgattggttttagcggattaggccatcgcctggcacggttatttacgccgagcgtgatggtcttgtttatgttgatgctgggcgcgcagctgaccactatctttttcaaaggtatgctcgggctgccgtttggcatagccgacccgaattttaaaattcagttaccgccgttcgcgctcagcgtggcggtgatgtgcctggtactggcgatgattatcttcctgccgcaacgttttgcccgttatggcctgctggtcggcaccataaccggctggttgttgtggtacttttgctttccttctagccacagcctctccggtgagttgcactggcagtggttcccgctcggcagtggcggtgctttgagcccgggaattattctgacggcggtgattacaggtctggtaaatatcagcaatacctacggtgcgattcggggcacggatgttttttatccgcagcagggcgcagggaatacgcgttatcgtcgtagctttgtggcgaccggatttatgacgctgataaccgtaccgctggcggtaattccatttagtccgtttgttagttccattggtttattaacccagactggcgattacacgcggcgtagctttatttatggcagcgttatttgcctgctggtggcgctggttcctgcactcacgcgactgttttgcagtatccctttacccgtgagtagtgcggtcatgctggtttcttatctgcctttactcttttccgcgctggtgtttagccagcaaataacgtttaccgctcgcaatatttatcgactcgcattgccgttatttgtcggcatatttttaatggcattaccgcctgtgtatctgcaagaccttccattaacgcttcgtcctctgctcagtaacggcttattggtcgggattttactggctgttcttatggataaccttattccgtgggaacgcatcgaataatttgttgaaaaaggattgataatgaagattgtcattgcgccagactcttttaaagagagcttaagtgcagaaaaatgttgtcaggcaattaaagccgggtttagcaccctctttcccgatgcgaactatatctgtttgccgatagcggatggcggcgaagggacggtggatgcgatggtcgccgcgacgggcggcaacatcgtgacgcttgaagtctgcgggccgatgggcgaaaaagtgaatgctttttatggccttaccggcgacgggaaaacggcggtgattgagatggcggcagcaagtggcctgatgctggtcgcgcctgaaaagcgtaatccgttgctggcctccagttttggtacgggggagttaattcgtcatgcgctggataacgacattcgccatattattctcggcattggcggcagtgcgacggtcgacggcggtatgggcatggcgcaggcgctcggtgtgcgtttccttgatgccgacggtcaggcgctggcggcaaacggtggtaatttagcgcgcgtggcaagcattgagatggatgaatgcgatccgcgtctggcgaattgccatattgaagtagcatgtgacgttgataacccgctggtaggggcacgcggcgcggcggcggtgtttggcccgcaaaaaggggcaacgccggagatggtcgaagaacttgaacaggggctgcaaaattacgcccgtgttttacaacagcaaactgaaattaatgtctgccagatggcgggcggcggcgctgcgggcggtatgggtattgcggcggcggtatttctcaatgcggatattaaaccgggcattgaaattgtgttgaatgcggtcaatcttgcgcaggcagtgcagggcgcagcactggtgattaccggggaagggcgcatcgacagccaaacggcaggcggtaaagcgccgctgggtgtggcgagcgtggcgaagcagtttaatgtaccggtgattgggattgctggcgtattgggtgatggcgtggaagtggtgcaccagtacggcattgacgcggtattcagcattttgcctcgtctggcacctttagccgaagtgctcgccagcggtgaaaccaatctcttcaacagcgcgcgaaatattgcctgcgccattaaaataggtcagggaattaaaaactaacccttacctttaaagcggatgcgatttatatcgcataagagtgcagtactcatgccggatgcggcatgagtaccatatccttcctgaaaatcgcgcaaattctatatattgcagagatcatgtaggcctgataagcgaagcgcatcaggcaatgttacaaaaaaagccacggtataaaccgtggcaaaatccaacatagctaaaaataatcaggcgagtggtatgacttaaatctctacgtcgcggttacaatctttgctgtaaatatagctgaacgcttcaccacgccctacaccataaccagcctgtaaagaataagcgcccataaagatgtaatcgccttttttcaccgggatccagttattgtcgaggttataaaccccctgaccggaaagaatataggcaccgtgttcctgaacgtgtgtttcgatataaccgtggctggcacctggtgcaaaagagaggatatgcatgttcatatcaaaacctaactctttgggcagaaaatccagcagaataacatcgtccatgccttcataatgaatgcgttccagttcgctggcattgccagaaaccagccacggtgcatagccttctaccggaacatagcggcgcttatataaaaagatttggctgtcttcggcctgggcgttaacaaacgtcattaaggagcctggcgggcaataaagatagccaccttcgcttaaggcaaatgttttgccttcggctttggcagtgatatttccagagatcacatacaggaacgtttcaatgccttcgccaccgaagccctgttggttgccaccgttttgatgcagtgtgaccagataatcaacaaaagaggcacccagctttggcgtggagaggattgtcgcgtcacaattttcaaagcccggaataatattttttaccagaccatccggggttaacagtgcgaaattaccgtgtttaacaatcgcacggttagccagtaaatcttcgcggtaaccggtgacgttatttaaatatcccatttatgactccttatttctgccaggcaagttgataaagcatgagtgccaacgttttgaccccttcggcaaggtcggtaatattggtgcgttccgccgggttatggctgatcccgttgatgctggggataaaaatcatgcaggttggtacgcgaggcgcgaaaatttgcgcgtcgtgcccggcaccactgtgcatcacccggtaattcagtttttctctttcacacaattctgtcagggtggcgaccagctccttattcatcggcacgggttcttcgtccatccataaatcgatatcaataccaatgtccatttcatcgcaaatcgcccgcatgtcgttttctaactgttgggtgaaatcgcgcagcacggcagcgtcggtatgacgacaatcaatggtgaacgtggttttacccggcaccacatttaccgtattcgggcgcggctctactttgccaaaggtcagaaccagcggatcgcccatccttttcgctttttcgacgctctgatggcaaatgcgactgaaagcgtaaactgtatcacgacgataacccatcggcgtggtgcctgcatggttactttcgccgttcagcgttaccgtataacgacgctgcccgacaattgcattcaccacgccaatactttgcccattactttccagcacacagccctgttcaatatgcagttcaacaaaggctttaatatcctgacgcggagttagtggggcgttcggaagagtaaatccgcaagccttcatcgcatcgacaaaactatttcctttggcatcacagatattccgcacgtcgtcaggattcgccagcccaaaaatatttttactgccccagaagacatacgggaagcggctgccttcttcttctgccatcgccaccacttcgaccgtacgtagcggcgcgccgtattgcgttttcagccagtcaattgccagccacgccgccagcgcgccgaattgcccgtcaaggttaccgccgttaaccacggtatcgatatggctaccgctcagaaccacttcctgtggatattcggtgccattcaggcgaccgtataaattccccacttcatcgaaacgtgtttccagcccgcttgctgccattctttttttaaattgctgctgggtttccagccattccgggctataaagtaaacgggtcatcccacccgctgggtcagcgccaaaagaggaaagccagggcagcgtttcttctatagcttgacggaaatgtgtaatcataagaaagtcctgtctcaataattattgcgcaaagggatttttcgtttcgtaactcgtgttataaagcgcgtcggaaattaaatactggtaaatatcatcaacaatttcgatgccttcgacggcggctttgcgttgtttaatatcctgatcctgtccgggataataaacctgattaaaaccgggcgcgggggtaatggcatttaattcgcgcatggtctggctaagatgttgacggaataattcgctggaggagaaaaagttcggattaataactatatgtaattgccccaaattacgccctgcgtgtaaatcgtcatacatgctactaacctgtcgcccgaacggtaagccgagtaagacgccactgaggacgtcaatcatcatcatcaggccatacccttttggcccggcggcggggagcagagcatgtaccgcgaacggatcggttgttggtacaccgtttttatcgaccgcccaggtatccgggatagacatattacggctgcgggcgtcgagcacttttccccatgcctgtacggtagtcgccatatcaaaggtaaggatctcgtcgccttctcccggcgcggcaaaggccagggggttagtaccgtagtaaatttccgcgccgccaaacggcaccaccattggatcggactggcacatgctaatgccaatgaatccggcgcgggctgcctgctgcacaaaataagagattgcgccgctgtgacccatccggctgataccgaccaccgcaacgccattttgctgggcggttttgatggcatgttccatacccattttcgccgcgacctgtccggcggcattgtcggcatgtaaaattgcgctgcacggcccggtttcctcaagacgaaactccggttcgcggttggtgccgcctttactaatgcgttccgcgtagtattccacgcgcaccgcgccatgagagtggatccctctggcatcggcgtaaaccaatacttcagccacggttgcagcgtgctcacgttttaacccagcctggcagagtttattctcaattagctggtggagtgtttcccgactgattttcatctgtcttcctttttaacgacggtgtgaagcatgactgcaattaacatacagggaaaatatctggattatgtgatccagacaggcaaaaaaatatagttagaatttatttgataatccgctcacttttaacctgatttttaaaacaacaacgcttattaaaaaataatgagtaatagcctggtggttatttgaattcttttgttaataattcctgtgtgatattcatcaccttatttactcgttgtcatcgataccgtaatcgccacattaacactgctcgtgcaattgccatgggtgcaatttttaaggagttgttatgatccacgcctttattaaaaaagggtgttttcaggatagcgtcagtttaatgattattagtcgaaaactcagcgaaagtgaaaatgttgatgatgtttccgtaatgatgggtacgcccgccaataaagcgttattagataccacaggtttctggcatgacgattttaataacgccacgccgaacgatatttgcgtggcaattcgtagcgaagcggcggatgcggggatcgcgcaggcgattatgcagcagcttgaagaggcgctaaaacaactggcgcaggggagtggcagcagccaggcgttgacgcaggtgcgtcgctgggacagtgcctgtcagaaattacccgatgccaatctggcgctgattagtgtggctggcgagtatgcggcggagctggcaaaccaggcgctggatcgcaacctcaacgtgatgatgttctccgataacgtcacgctggaagatgaaatccaacttaaaacccgcgcgcgggaaaaaggcttgctggtgatggggccggactgcggtacgagcatgattgccggcacaccgctggcttttgctaacgtgatgccggaaggcaatattggcgtcattggcgcttccggtaccgggattcaggagctgtgtagccagattgcgctggcaggggagggaattactcacgcgattggccttggcgggcgcgacctcagccgtgaagtgggcggcatcagtgcgctaacagcgctggaaatgctcagtgcagacgagaaaagcgaagtgctggcatttgttagtaaaccacctgccgaagctgtgcgtctgaaaattgttaatgccatgaaagcaaccggcaaaccgacggtggcgctgtttttaggttataccccggcggtggcccgcgacgagaatgtctggtttgcctccagcctggatgaggccgcacgcctggcttgcctgcttagtcgcgtcacggcgcgacgtaacgcaatagcgcctgtcagcagcggatttatttgcggtttgtataccggcggtacgctggctgccgaagcggcgggattacttgccggacaccttggcgtggaagccgacgatacccatcaacatggcatgatgctggacgccgatagccaccagattattgacctcggcgatgatttctacaccgtcgggcgtccccatccgatgatcgacccaaccttacgcaaccagttaattgccgatctcggcgctaaaccgcaagtgcgcgtgttgctgcttgatgtcgtgattggcttcggtgcgaccgccgatcctgccgccagcctggtgagcgcctggcaaaaagcctgtgccgcgcgtttagataatcaaccactgtatgccattgccacggtgacaggcactgaacgtgacccgcaatgccgcagccagcaaatcgccacgctggaagatgcggggattgcggtcgtgagtagcctaccggaagccaccttgctggcggcagcgttaattcatccgctcagccctgccgcacagcaacacacaccgagtttactggaaaacgtcgccgtgattaacatcggattacgcagctttgcgctggagctacaaagcgccagcaaaccggttgtgcattaccaatggagcccagtcgccggtggcaataaaaaactggctcgtttattagaacgtttgcaataaggggttcccatgtttacatcagtggcgcaagccaatgctgcggttatcgaacaaattcgtcgcgctcgtccacactggctggatgtgcaaccggcttcttcacttatcagcgaactaaacgagggcaaaacactgcttcacgccgggccgccaatgcgctggcaggagatgaccggacccatgaaaggggcgtgcgtgggcgcatgtctgttcgaaggttgggcgaaagatgaagcgcaggcgctggcaatactggagcagggggaagtgaacttcattccttgtcaccatgtgaatgccgtcgggccaatgggcggtattacttctgccagtatgccgatgctggtggttgagaacgtgaccgacggcaaccgggcgtactgcaacctcaacgaaggtatcggcaaagtgatgcgttttggcgcttacggcgaagatgtcctgactcgccatcgctggatgcgcgatgtgttaatgccagtattaagcgcggcgctggggcgcatggagcgcggtatcgatctcacggcgatgatggcgcagggcattacgatgggcgatgagttccatcaacgcaatattgcttcctctgcactgttaatgcgtgcgctggccccacaaattgctcgcctcgatcatgataaacagcacatcgccgaagtgatggatttcctcagcgtgaccgatcagttcttcctcaacctcgcgatggcttactgcaaggcggcgatggatgctggcgcgatgatccgcgcaggcagcatcgtcacggcaatgacccgcaacggcaatatgttcgggattcgggtaagcgggctgggcgaacgctggtttactgcgcctgtaaacactccgcaaggtctgtttttcaccggcttctcgcaggagcaggcgaacccggatatgggcgatagcgcgattaccgaaacctttggtatcggaggtgcggcaatgatcgcagcgcctggcgtaacgcgctttgtcggtgcgggtggcatggaagcggcaagagcggtatctgaagagatggcggaaatttaccttgaacgcaatatgcagttgcagatcccaagctgggattttcagggcgcgtgcctggggctggacattcgtcgcgtggtagaaaccggcattacgccactcatcaataccggtatcgcccataaagaggcggggatcgggcagattggcgcaggcaccgtgcgggcaccgctggcgtgctttgaacaggcgctggaagcactggctgaaagcatgggtattggttgaggaacgcgcaatgacgatcatccatcctctgcttgccagtagtagcgcaccgaattatcgccagtcctggcggttagcgggagtgtggcggcgggcgattaacctgatgacggaaagcggcgaactgttaacgttgcatcgtcagggtagtggtttcggccccggaggatgggtgcttcgccgtgcgcaattcgatgcgttatgcggtggattatgcggcaatgaacgaccacaggttgtggctcaagggattcgcctcgggcgtttcacggttaaacagccacagcgttattgtttgctgcgtattacgccgcctgcgcatcctcaaccacttgcagctgcatggatgcaacgcgcggaggaaaccgggcttttcgggccactggcgttggcggcaagcgatccgctgcctgctgagttacgccagtttcgtcactgttttcaggccgcgctcaatggcgttaagaccgactggcggcactggctgggtaaaggccccggattaacgccgagtcatgatgacacgctgagcggaatgctgctggcggcctggtattatggcgctttagatgcgcgctccggtcgtccgttttttgcctgttccgacaatctgcaactcgttaccacagcggtgagcgtcagttatttacgttatgccgcgcaaggatatttcgccagcccactcctgcactttgttcatgctctgagttgcccgaaacgtaccgctgttgcgattgatagcctgctggcgctggggcatacgagtggggcagatacgctgctggggttctggcttggccaacaattattacaaggaaaaccatgaaaacactggttgtggctcttgggggcaacgccttactccagcgcggtgaggcgctgacggcagaaaatcaatatcgcaatatcgccagtgctgtacccgcgctggcacgcctggcccgttcttatcggttggcgattgttcacggcaacgggccgcaggtggggctgctggcattgcagaatctggcgtggaaagaggtagaaccgtatccgctggatgtgctggttgcggaaagccaggggatgattggctatatgctggcgcagagtttgagcgcacagccgcagatgccgcccgtgacgacggtgctgacgcgcattgaggttagccctgatgatccggcgtttttgcagccagagaaatttattggtccggtttatcagccagaagaacaagaggcactggaagcggcttacggctggcagatgaaacgtgatggtaaatatttgcgccgggtggtggcgtctccgcaaccgcgtaaaattctcgacagcgaagccatcgagttgttgctcaaagaggggcatgtggtgatttgcagtggcggcggcggtgtgcctgtgacggatgacggagcagggagtgaagcagtgattgataaagatctcgccgctgcgttgctcgccgagcagattaatgcagatggactggtgatcctcaccgatgctgatgcggtatatgaaaactggggaacgccgcagcaacgtgccattcgccatgccacaccggatgagttagcgccatttgccaaagccgatggtagcatggggccgaatgtaacggcggtgagtggttatgtcagaagccgtggtaaacccgcgtggattggggcgttaagccgaattgaagagacgctggcgggcgaagcggggacctgtattagcctgtaatcgtaggcattagacatttgtgcctgatgcgacgcttgacgcgtcttatcaggcctacaaccggtgccgcatccggcaattggtgcacaatgcctgatgcgatgcttgacgcatcttatcaggcctacaatgggtaccggatcggtaggccggataaggcgtttacgccgcatccggcaagaatagagcaccagttaaccgaacttactctgcgcccaaatcacgccgctggcatattccggcggcagcagcgggattaaggcttccagcgtcgcagtcagacggcttgtgtcgctgtcggtcaaattcagatgccccactttacgccccggacggacttctttgtcgtaccagtgcagatgcaccagcggcagtttcagccagtcataattcacatcgctaccaatcagattgatcatcacgctcggattattcaccactggttgcggtaacggcagatcggtaatcgcccgcagatgcagctcaaactggctgatgctggcaccgttttgtgtccagtgaccgctgttatgcacacgcggtgccagttcgttgatcaacagaccttgcggggtgacaaaacactccatcgccatcacgcccacatagcccagctcctgcataatcgcgctcagcatctcttcggcttgcgcctgctgctgtgcgttggcctgcggaaaagcgacgctggtgcgcaaaataccgtcctgatgcaggttatgcgtcagcggataaaacacggtgctgccatcaaagccgcgcgcgccaaccaggctcacttcaccagagaagttaatgccctgctcgacaatacattcgccgtaacactctgccggtaactgttcggtttcatttgcgcgtaaacgccattgaccgcgaccgtcataaccaccagtgcgacgcttaacaatcgccagctcacctaaacgatcaaacaccgcaggccactcgctgcgttcggcaagtaactgccacggtgcagtcggcaggtggagcttatcgaaaagctgcttctgagtcagacggtcagcaataatcgggaacacatcgcggttcacaaaggccggatggcgcgccagctcgcgggttaatgcggtttccggccagcgttctatctcagcggtaatcacgctttgttgaaaaggcaccgccgccggttcagcgtccagcccgactggccagacagcaatgcctaacggttcgcctgcctgacgcagcatacggcctaactgcccgttaccgaggacgcaaacctgtttcatgccgcacctcgcgggtccgggttttccagcacttcgtcggtctgggctttgcgccagtcattcagacgctggtgcagttctttatcatgagtcgcaagaatttgtgctgccagtaacgccgcgtttgccgcgccagctttaccaatcgccagcgtacccaccggaatgccgcgcggcatttgtacgatggagtagaggctatcgacaccgctcagtgcggcgctctgtactggcacgcccagcaccggcaccagcgttttggcggcaatcatgcctggcagatgcgctgcgccgcctgcgcccgcaataatcacctgataaccgttctcttcggcgctttcggcgaagctgaacagtttatcgggggtgcggtgagcagaaaccacttcaacgtggtgcgggacattcaggatttcgaagatttcggcggcgaactgcatggtagcccagtcgcttttggaccccatcacgatggcgacacgcgccggattattgcgggaagacatgcgtcttaaaactcctgtggtgcacaactctcggctttagagggcacagagaatagcacggaaagagagcaaggaaaacggttgcgtggctgtgaaatcagcaaagttgcgggttttttaaaacggaaaatgaatcagctcaacgtcatccgccgtgactttcaccatactaccttccgtatgccaggcacccagtaccacgcgaaaagcaggttgctgattggcgataagttcatgcaccgccgggcgatgggtatgcccgtggatcagccattgcacctgatgtttttccatcgcactgaccaccgcgttttggttaacgtccatgatcgccaggcttttactgctgttggcttctttgctgttcgcgcgcattcgcgcggcaatgcgtttgcgcacaaacaacggcagggcgaggaatagcgtctgcagccagggtttgtggaccttggcgcgaaaagcctgataacccgcgtcatcggtgcacagcgtgtcgccatgcataatcaacacccggcgaccataaagttcgagcaccttttcttccggcaataacgtcatgccactttcacgggcaaagcgtttgccgagcagaaaatcacggttgccatgaatgaaataacagggaacgccggaatcggacaccgctttgatcgccgccgccatcttgcgatggagtgggttgggatcgtcgtcgccaatccatgcttcaaacagatcgccaagaatatacagcgcgtcggccttgcgggcttcccccgctaaaaaacgcagaaaaccggcggtgatcgccggttcttccacgcagagatgaagatctgcaataaagagtgtcgccacgattactcgctaacggtcacgctttcaatgataacgtcttcttttggcacgtcctggtgcataccgctacgaccggttgcaacacctttgattttgtctaccacgtccatgccgtcaaccacttcagcaaacacgcagtagccccaaccttgcaggctttcgccagagaagttcaggaagtcgttatcaaccacgttgatgaagaactgtgcagttgcagagtgcggagcctgagtacgtgccattgccagcgtaccacgggtatttttcaggccgttgttggcttcgtttttgatcggttctttggtggctttttgtttcatgcccggttcaaaaccgccgccctgaatcataaagccgttgataacacggtggaaaatggtgttgttgtaaaaaccttcgcggcagtagtccaggaagtttttaactgtttcaggtgctttatcgtcaaaagttttgatgacaatatcgccgtgattggtgtggaaagtaaccatttttgcatcctgttccgtttgattggtgcttcaacccagttcgggtcatatatagggtggtgttatagcataaccgcacgatcggatcatcacgcaatgtatgctgattcgcgcgggaaatatgggtattatacgcaactcaattacccacacatgtctaaacggaatcttcgatgctaaaaatcttcaatactctgacacgccaaaaagaggaatttaagcctattcacgccggggaagtcggcatgtacgtgtgtggaatcaccgtttacgatctctgtcatatcggtcacgggcgtacctttgttgcttttgacgtggttgcgcgctatctgcgtttcctcggctataaactgaagtatgtgcgcaacattaccgatatcgacgacaaaatcatcaaacgcgccaatgaaaatggcgaaagctttgtggcgatggtggatcgcatgatcgccgaaatgcacaaagattttgatgctttgaacattctgcgcccggatatggagccgcgcgcgacgcaccatatcgcagaaattattgaactcactgaacaactgatcgccaaaggtcacgcttatgtggcggacaacggcgacgtgatgttcgacgtcccgaccgatccaacttatggcgtgctgagccgtcaggatctcgaccagctgcaggcaggcgcgcgcgttgacgtggtcgacgacaaacgcaacccaatggacttcgttctgtggaagatgagcaaagagggcgaaccgagctggccgtctccgtggggcgcgggtcgtcctggctggcacattgaatgtagcgcaatgaactgcaagcagctgggtaaccactttgatatccacggcggcggtagtgacctgatgttcccgcaccacgaaaacgaaatcgcgcagtccacctgtgcccatgatggtcagtatgtgaactactggatgcacagcgggatggtgatggttgaccgcgagaagatgtccaaaagcctgggtaacttctttaccgtgcgcgatgtgctgaaatactacgacgcggaaaccgtgcgttacttcctgatgagcggccactatcgcagccagttgaactacagcgaagagaacctgaagcaggcgcgtgcggcgctggagcgtctctacactgcgctgcgcggcacagataaaaccgttgcgcctgccggtggcgaagcgtttgaagcgcgctttattgaagcgatggacgacgatttcaacaccccggaagcctattccgtactgtttgatatggcgcgtgaagtaaaccgtctgaaagcagaagatatggcagcggcgaatgcaatggcatctcacctgcgtaaactttccgctgtattgggcctgctggagcaagaaccggaagcgttcctgcaaagcggcgcgcaggcagacgacagcgaagtggctgagattgaagcgttaattcaacagcgtctggatgcccgtaaagcgaaagactgggcggcggcggatgcggcgcgtgatcgtcttaacgagatggggatcgtgctggaagatggcccgcaagggaccacctggcgtcgtaagtaattgcgctattgccggatgcgagttttcgcatccggttatcgtctgcgccaccacaacattcccatcagtagcatccccggcaaccacacccacatcaattcagaaataatcacctgatgcccgtacggcgtggtgtaacgagacaatgcaaacggcgcgacttttatcacctgccagggagcgaaaaagcgttcatcactccacggccacagccagccaacgcctttaccgccagtggttacgctatccagcaagctgtggcttagcaagctgacggttaaaaacagccagcagcgaatcagcccagccctgaaccatcggcgtccaataaacacacataacagcgggacaacaaacgcaaacaccaggctatgggtaaacccgcgatgaccaaaaacattgccgtaagcaacgccaaatttaaagctcaatacgtcggcgtcgggcagcatcgccaggatgattccggcaaataacagacgcggagggatgactttgctacccaaccctaaaccaatgcataggggaacggcggcgtgcgtaataacggttggcatgatggtcgcttcggcaaaatgtcgatgctatcagcatggatgaacggggcgtagagggcaaaagtctgaaaagagaaccggcctgttgatacaggccgggaaagggatcaggcaacaacctgtacgctgtgacctgcaaaactcactgtctgaccggcgacgattttgcagcgtttgcgcgtttcaaccgcaccgtcgactttcacctggccttcggcaatcgcgattttcgcctgcgcgccgctttcgctccagccttccagtttcagcaagtcgcacagctcaacgtgcggatgtttacctaaagaaaatgtcgccatgttactcatcctgtggatcatgatattcaacgcacgcctgtagcgtgttttcaatcagcgtggcaaccgtcatcgggccaacgccgccgggaacaggcgtaatgtaactggcgcgtttagccgcgtcttcaaacacgacgtcgcccacaactttgccattttccagacggttgatgccgacatcaatcacaattgcgccttctttgatccagtcaccgggaataaagcctggcttgccaacggcaacgatcaatagatcggcattttctacgtgatgacgcagatttttagtgaagcggtgagtcactgtagtggtgcaacctgccagcagcagttccatgctcatcgggcggccaacgatattgcttgcgccaatcaccacggcgttgaggccgaaggtatcaatgttgtaacgctcaagcagcgtgacgataccgcgcggggtgcagggacgcagacgcggcgcgcgctggcacagacgaccgacgttgtaaggatggaaaccgtccacgtctttgtccggatgaatacgttccagcactttgacgttatcaatacccgccggtaacggcagttgaaccagaatgccatcgatggtgttgtcggcattcagcgtatcgataagctccagcagctccgcttcgctggtggtttccgggaggtcataagagcgggagacgaacccgacttcttcacaagccttgcgtttgcttgcgacataaatttggcttgcagggttactacccaccagcacaacggccagtcctggtgcccgcagtccggctgcaatacgcgcctgaactttttgagcaacttcagagcgcacctgctgcgcaatcgttttaccgtcaataatctttgctgccatcagagagaggattccatctgttacgtagatcgaaggggatgcgcctattttgtcagaagcggggcgcgctgtcaggtttcgtttcagatttatcgcgtgaagcgacctcttgcgaaggtgaggcgcaccgtcgctgagactgaaagcttcatttttcgtccatgatggcgttgtaaatctggaactgatttatttccttgtctaaggattaagataatttaagaaatacctgacaatataaaaagaattttcagcctggtaatttaccgcttcaggtctatatttgtgttgaatatattttgcgcggaagtattcatctaacggggctctctattttttagaatagagtgcatattttcaattaagacattcttagaggataaaaaggaatttactactatcagtgtcttaaataaagtaatcggttatatacggatgtggagtcgataaatgagattgaaggaatatatatgaaattaagatttattagctctgcgctggctgccgcactattcgccgctacgggtagttatgctgccgttgtagatggcggtacaattcactttgaaggcgaactggtgaatgctgcctgtagtgtgaatactgacagcgcagaccaggttgtcacactcggtcaatatcgtaccgatattttcaatgctgttggtaatacctctgcattaattccattcaccattcagttgaacgactgcgatcctgttgttgccgctaatgctgccgttgcattttctggtcaggctgatgcaatcaatgataatttattggccattgcatccagtaccaatacaacaacagcaacgggtgtcggtattgaaatacttgataatacatccgcaattctcaaacctgatgggaatagcttcagtaccaaccagaacttgatccccgggaccaacgttcttcatttttctgcacgttataaaggcaccggtacaagtgcaagtgcagggcaagcaaatgctgacgcgacttttattatgagatatgaataatcaaaaccacgttgttttgaattatatatcacgtcttataacaaagtaatgtaccggttgtctgaagcggtatggtggcaatgtaaatcgaaatcatgttcactttgtatcatgccgctttattaaatgaaaagggaatgatgtgttgtaagaaaccaaagcaatcatttctttatattccttatttttgccgtcaggaatacacaaggcgtattaactatgatgactaaaataaagttattgatgctcattatattttatttaatcattagcgccagcgcccatgctgccggagggatcgcattaggtgccacgcgtattatttatcccgctgatgctaaacagactgcggtatggattagaaatagccataccaatgagcgctttctggtcaatagctggattgaaaacagcagcggtgtaaaagaaaagagtttcatcattacaccgccactgtttgttagtgaacccaaaagcgaaaatactttgcgtattatttacaccggtccaccgctggcagcagatcgtgagtctctgttctggatgaatgttaagacgatccctagcgtagataaaaatgcattgaacggcaggaatgttttgcaactggcgattttaagccgcatgaaattatttctccgtccaattcaattacaagaattacccgcagaagcgccggacacactcaagtttagccgatccggtaactatatcaatgttcataatccaagtcctttttatgtcaccctggttaacttacaagtgggcagccaaaagttggggaatgctatggctgcacccagagttaatagtcaaattcccttacccagtggagtgcagggaaagctgaaatttcagaccgttaatgattatggtagtgtaactccggtcagagaagtgaacttaaactaaccgaatcatctgacaatatcagagctaattatgaaaatacccactactacggatattccgcagaggtatacctggtgtctggccggaatttgttatagttctcttgccattttaccctcctttttaagctatgcggaaagttatttcaacccggcatttttattagagaatggcacatccgttgctgatttaagccgctttgagagaggtaatcatcaacctgcgggcgtgtatcgggtggatctctggcgtaatgatgagttcattggtagccaggatatcgtatttgaaagcacaacagaaaatacaggtgataaaagtggtgggttaatgccctgttttaaccaggtacttcttgaacgaattggccttaatagcagtgcatttcccgagttagcccagcagcaaaacaataaatgcatcaatttactgaaagctgtacctgatgccacaattaactttgattttgcagcgatgcgcctgaacatcactattcctcagatagcgttgttgagtagcgctcacggttacattccgcctgaagagtgggatgaaggtattcctgctttactcctgaattataatttcaccggtaacagaggtaatggtaacgatagctattttttagtgagctcagcgggattaatattggcccgtggcgtttacgcaacaatggttcctggaactattttcgcggaaatggatatcatagtgaacagtggaataatattggcacctgggtacagcgcgccattattccgctgaaaagtgaactggtaatgggagacggcaatacaggaagtgatattttcgatggcgttggatttcgtggtgtacggctttattcttctgataatatgtatcctgatagccagcaagggtttgccccaacggtacgtgggattgcccgtacggcggcccagctaacgattcggcaaaatggttttattatctatcaaagctatgtttcccccggcgcttttgaaattacagatttgcacccgacatctagtaatggcgatctggacgtcaccatcgacgagcgcgatggcaatcagcagaattacacaattccgtatagtacagtgccaattttacaacgcgaagggcgtttcaaatttgacctgacggcgggcgattttcgtagcggtaatagtcagcaaagtagccctttcttttttcagggtacggcactcggcggtttaccacaggaatttactgcctacggcgggacgcaattatctgccaattacaccgcctttttattagggctggggcgcaatctcgggaactggggcgcagtgagcctggatgtaacgcatgcgcgcagtcagttagccgacgccagtcgtcatgagggggattctattcgcttcctctatgcgaaaagcatgaacaccttcggcaccaattttcagttaatgggttaccgctatagcacacaaggtttttatacccttgatgatgttgcgtatcgtcgaatggaggggtacgaatatgattacgacggtgagcatcgcgatgaaccgataatcgtgaattaccacaatttacgctttagccgtaaagaccgtttgcagttaaatgttagtcaaagtcttaatgactttggcagcctttatatttctggtacccatcaaaaatactggaatactagcgatagtgatacgtggtatcaggtggggtataccagcagctgggttggcatcagttatagcctcagttttagctggaatgaatctgtagggatccccgataacgaacgtattgtcggacttaatgttagtgtgcctttcaatgttttgaccaaacgtcgctacacccgggaaaatgcgctcgaccgcgcttatgcctcctttaacgccaaccgtaacagcaacgggcaaaatagctggctggcaggtgtaggtgggaccttactggaaggccacaacctgagttatcacgtaagccagggtgataccagcaataatgggtacacgggcagcgccacggcaaactggcaggccgcttacggtacgctggggggcgggtataactacgaccgcgatcaacatgacgttaactggcagctgtctggcggtgtggtcgggcatgaaaatggcataacgctgagccagcctttaggggataccaatgttttgattaaagcgcctggcgcaggcggtgtacgcattgaaaatcaaactggcattttaaccgactggcgcggctatgcggtgatgctgtatgccacggtttatcggtataaccgtatcgcgcttgataccaatacgatggggaattccatcgatgttgaaaaaaatattagcagcgttgtgccgacgcaaggcgcgttggttcgtgccaattttgatacccgcataggcgtgcgggcgctcattaccgttacccagggcggaaaaccggtgccgtttggaagtctggtacgggaaaacagtaccggaataaccagtatggtgggtgatgacgggcaagtttatttaagtggtgcgccattgtctggtgaattactggttcagtggggagacggcgcgaacagtcgctgcattgcgcactatgtattgccgaagcaaagcttacagcaagccgtcactgttattagcgcagtttgcacacatcctggcagttaaaggaaattatcaataagataatctgcagattattattggcgatggcatgtttgtgtctggcaaacatatcctgggctactgtttgtgcaaatagtactggcgtagcagaagatgaacactatgatctcagtaatatctttaatagcaccaataaccagccagggcagattgttgttttaccggaaaaatccggctgggtaggtgtcagtgcaatttgtccacccggtacgctggtgaattatacataccgtagttatgtcaccaactttattgttcaggaaactatcgataattataaatatatgcaattacatgattatctattaggtgcgatgagtctggttgatagtgtgatggatattcagttccccccgcaaaattatattcggatgggaacagatcctaacgttagccaaaaccttccattcggggtgatggattctcgtttaatatttcgtttaaaggttattcgtccctttattaacatggtggagatccccagacaggtgatgtttaccgtgtatgtgacaagtacgccttacgatccgttggttacacctgtttataccattagttttggtggccgggttgaagtaccgcaaaactgcgaattaaatgccgggcagattgttgaatttgattttggtgatatcggcgcaagcttatttagtgcggcagggccgggtaatcgacctgctggtgtcatgccgcaaaccaagagcattgcggtcaaatgtacgaatgttgctgcgcaggcttatttaacaatgcgtctggaagccagtgccgtttctggtcaggcgatggtgagcgacaatcaggatttaggttttattgtcgccgatcagaacgatacgccgatcacgcctaacgatctcaatagcgttattcctttccgtctggatgcagctgcggcagccaatgtcacacttcgcgcctggcctatcagtattaccggtcaaaaaccgaccgaagggccgtttagcgcgctggggtatttacgcgtcgattatcaatgaggtacggagaatgagaagagtactctttagctgtttctgcgggctactgtggagttccagtggatgggcagttgaccctttaggaacgattaatatcaatttgcacggtaacgttgttgatttctcctgtaccgtaaacacagcggatattgataagacggtagatttaggcagatggcctacgatacaactactgaacgctggcgataccacggcactcgtcccttttagcctgcggctggagggatgtcctccgggtagtgttgcgattttatttacgggaacgccggcatccgataccaacctgctggctctggatgatcccgcaatggcacaaaccgtcgccatcgaattacgtaatagcgatcgctcccggctcgcactgggggaggcgagcccgactgaggaagtagatgcaaatggcaatgtcacactaaacttttttgccaattatcgagcgttagccagcggtgttcggccaggtgtggcgaaagcggatgcgatatttatgatcaattataattaatattatattaattcgtataatttggcgtagtcgataagctctacaatactatgcaaacctagcttgccataaatattagatttatgcgcactaactgttttattgctaagtaataacttatcggcaatttctttattagataatccgctaaccagataacgtaatatggtcacttcacgattagatagcacagtgaccgtactactattcgtactacatttattgctttttatatagttaagcgtttcgctgggaaaaaacgtgtatccggagaggatcatctgaacggcatgaaaaatatcattctgatcattgcatttactgacaaaaccgttagcaccagcttgtatcgctctgccagcataaaagcattcacttttgctacttaaaaataacactttcactgtgctctggatttgtttgatccttttcaggaaggtaaaaccgtctgttccgggcaagtctatatccataatgattaaatcaacaggacgggttcggagataatcgatggttatgcgataatcatccgttttcaggacaatctgcaattcactgtttttttgcaacagaacttcaatagacattctgatgataggatgagtatccataatgatcacgctcgttggtttcatagttaccagtctcataggagcggacaattttccgttaggtcgggaaattgtactttgatacatgaaaatacgggttttcttgattcagacgcgcagcggtgtgcgtttgtttgccgctatagcgaaataaatcagaaaatcagacgcggtcgttcacttgttcagcaaccagatcaaaagccattgactcagcaagggttgaccgtataattcacgcgattacaccgcattgcggtatcaacgcgcccttagctcagttggatagagcaacgaccttctaagtcgtgggccgcaggttcgaatcctgcagggcgcgccattacaattcaatcagttacgccttctttatatcctccataatttcagagtgggacatatttgggacattatcaccaaaaatgtcgtctattttcctcgcatgctctgtcaaatgattaggcgcaaggtgagcatacctacgaaccatttctatggactcccatccgcccatttcctgaagcactgataatgggacgcctgactgaatcagccagcttgcccaggtgtgtctgaggtcatggaaacggaaatcttcctcatttatgcccgtcttatccgtttccgctttgcccttcaccacatcactttttgtcgctgtttggcgagataattcaacggtgtcaggccgtaaaacgccttaaaaacagagataaagtagctcgtgctgctatagccacataattgcgccacctgagtgatatttttgttatccatcaataacatctgtacggcgtaacgcatacgacactctgtgacaatctggctatagctggtattttcgttttttaatttctttttgagcaggctggggcttaaacataggctactggcgacaattcgcagattccagtaatgctgaatatcgctttgaataatgcggcagacgctgtcgcggacgctgctgcgtaagatatacatcagtagggcaataaaccggctttgctcaagaaagttagacaatacggtaaaaagcaatgcgcgcgtcaactccgcttcgcagggtctgctgggttgctgcttgctgtggttggcggctagccggaacacttccggtgtacggctatgacaagcgataaccggggttgccagccggctccagggctttacacaggttaagttcttatttaaaaacaacagataatcgttgatgatgttacggttgatgtgggtgattaatacgtgatttaacgtactgagttcaatgacgttattgttgcacgcgaaggcggccaggtagtttttcggaagggtaaacgtagcatggttattgacgcttacctctacctctttttcggtcaggatcaccacgcaaggttcactgctgctcaattgcatttcgcactcctcagatatcagaaactccgctcaaaggatctatgcttcctgcatgagtgatcggcccgttcgccgataacgatcttctttctttagcacgctttttagcaattaatcttgatggaattctgatgagagcgaaagaggtaagccaggtcgtacccgacttacctggaggagatttaatactcgagaatgccgtgcgcgacgggcaaatagcgcagagagaaatagagagtgtctttaccgcaagaggaacgtttcgctaacaggctggcaatttctgcgtccggtttcggtttcgctgtaaaggttttgcctttgccggcgacaaaaagttcataaacaacgccgctggcaggggcgggactttggcaatcggcgctggcctgtaaataacgttcacgctgttcagcggtcagtttatccacgccgctgccatcctgtacccagacattaacgccggttgctttaacgtgttccagcagttggcgatagccatcggggctcatgtttccggcgaaaaaactactgatataaaccggttttgcactaacatcgctaatcagccgctgcgcgttgtttaaccatgttagcaaaggctgacgggcggcttcgctgcgccagttcaggtcgtcaatttccgcgctgatgtaccagccatccggcgttatgccaggcgcggcgctccataatctggcttgctggagatcggcagccagcaggcgattaagatagctttccagcgctgcggagctctgtttctggtgcataaaaaattccggatcggcgttcagcccgacaataagcttcagaccagcctgttgcgcagctgcggcccgcttaaacaataacgtgcgctgttctggctgggtaaatgcatcgccgtaacgggtccattgcaaaacaagggtatcgaagccttgcaaacgtaactgactcatcagcccctgccactgggtatcggtaacctgactatctcggttttgtggttgccagataatacctttcatcgcaaaggaaaaagggctgaccaaaagcagtgtcagcaatacgaaaatgaacttacgcatttaccagtgcactccaatggtgagaaacgcgttgttgcgctctccgttacgttgattaatcgccttaaaggtatgttgatactcgacgccgagactgactttgtgcggccaggcgtcgtagtgcgtctcgccggtccagatattccagcggaccccgactccgccaagctgcgcgccctgagtgcctttatcacgatagccgttgtcctgaacgtgagcgtaaggctcaatagtctgtccgttagctaccttctgatgccagctgacgcgataatctgccgtccacgcctgaatatcctggcggatatattgcgccgcatcgaggtacaggttttgggcaaaccagccactaccgttcgggtgccattcgtcgctgtatttgccgccattaaagaaactggcgctggcgcgcagcatggtatcggatgcgccattttggccgttcagcggcaactgctgttcgacggcgatgaaaaagatctgatcgcgcagcggcttccagcgcagaccggtgccggacatcggatttttcaccggcatcatcaccccgttttctccggtatcggcaaagacgcggctataaacactgagcaggtcgccttccagcagcatattgcgtccgatgcggtactcggcttccagttgtccgtagctacgatagcttttccctggcgctgcgccgccgacattattgttagcggtactcattgcgccggaacgcaagccgatggaagaatcgaaactgaacgtccagcggcgaccgacctcctcatgcaaacggcggaaattgaagcgttgttgattttgttctggggtcagtggggttatcagcgcctgattatcaatgtcatcaatcaccagccgggcgtagtgctgcgtcgcaggcatgtcatccagacgctggttcacgtaggccagttgtcggatcagtgccggatcgtccggaagccctttatgcgccggttcgagcatttcccggctctgtgcgatatcaccgctatcccacaaggcgtaaccaagcgctgcctgggtgttgctattattcggttccagttccagcgcggcgcgcaaatcactcaccgcggccgggacattatgacgttggcgataaattgtcgcccgcgcaacgtaagcgttggcagaaggcgcaatattgatactgcgcgtgagatcgttcagtgcgagttccggctgaccaggaatgtaacgttgcgcatgcagccaccagtagagggcattgcttcccagtccacgtttttctgcctgttgtagccagcgatcgcgagccgcaccatttcctgccgcctgggcggtattggcagcagcaagcagatcctcattgctcatgtcgtgaagactgattttctgccaggccgccagtgcggtggcgtagtcctcaacctgatacgcctgataggctaccgcacgatgttgccaggcgctcggttgtcgttgttcggcctgaagccatgcatacaacgccacaccgggtagcgtgtcccgataacactttgccagacggttccaggcggcggcatcgtaggaagggctcatatcgcccagcaagcgaactattgccgggcaattatctgcaatacccggcaactgactttgccactgacgttgctccgccagcggtaagggtttgcttaaaatcgccaccttcgccggcgttgccaggtaaggatgactttccagcagagacgccagtcgcgccattaaagtctggctgacacgcgcatcgccctggaaaggatagcgttgcagcaataaatcggcagcttcgcgactctgctcgttctgcatcagttgccaggttagttgatccaggcgggtaagatttgccggttcttgctgatacagcaatcgtgccagacgcagagcttcagccttgttacgggtcgccacgctgacagcataacgctcctcaagcatttcattggcggggagggtggcgagcagtttttgcgctgcgtcgtactgaccttcttttaacagcaccggtagcgtcgcgccaacaacatactggcggttgtcggcaaactgtaccgtataattcgccaacgcctgaacggggttagcgctgtatttagataacagatagagccaacttttctcttgtgcgtccgtggtaaatagtggcttattttcaatgagataatgctggaggcgtgctttttcgccacgataagccagcgcggtcgcgtaagtaatataactctgaggatcggtgaagatcccctgactttgcagtgccaggatccgatcgtccagctgcccggcaagaagcacgtcaaaccactgacggcgttctgccgcgcttaatgtgttctgctggcgtgcttcattgtatagcgtatctgcctgggaccattgtttcaggtagattgcccgttgcagcagatcggttcgcagcgtttttccttccgggcttgcagcaaacgtcgcatcgttcagttgcgctctggcgacaggtaactgtgccagccgcagggcattctgcccgacttcactgcgacaacgcagggtcggcgcagcatcgcacgctttttgctgggcaagcagttcttcaactgtcgtaacgcttttcacttcaaccggaatagccgccagactgcgctcaagtcgggcatctcctgggtgacgtttcagttgatcctcaagcaacagccgcgcccggtcatcatgaccaaaatggcgataggcttccgcaaggtataaagtcagcggaatattatccggcacctgctggtgtatatattcaaattcgcggatggcggttgcttcgtcgttatttttctgtgccttcagcgctttatcgagacggggataaataacaaaatggcgataatcgctcagccccagctcttctgcgctggtgccgatattgtctgcgagtgcgctggtactcaataaagacgtcagcagtaaaccagaccatccgatgacgcgattaaggttattctccttcattttcggactccagttgcgcaacctgttctgtgtttaaacctgctttgagtaatagactttgcatgctaacttgtaattcgcgttgaattgtcaggacgcgatccaacgtttcctggctgataacgccttcggtgaccaaaaacttgccgagcggcagagaactgcgttcatggcgcaataacaacacgttaattgcactacgattaatatgaccgagcgtggtcagtatttcggcgaacaggaactgatgcggcacatattgccgccagatttcaccggcctgctgttccgtgagccactgatgctgaaccgcattgtacaacattgcccgcggatcgtgaccgcgtcggcgtgcataccagtgacgtaaccctgtgacaatttgtccccgcagaacaatgacgtaacgcactttgcgtccgactttacgcgtcagggccgccaggctaaccgggtcaataccatcttcactgccgacaattaactcgtcattttccagacgcagcggcagtaccgcataatgcagcgccacggaggccggcatttcggcaatcaggctggaagggatctgccaggcatcgatggattcccacgccacgccgttttgctctgccagcgcctgtgccagctgctcggcgctaatcagcccctgcatcagcatactaccgcccaggcgtagaccttcgacgcgattacgcagtgctgtatcgagttgttcttcagtgatgacctgattttccagcagaatttgacctaacgggcgcaagctgcgggtatcgccagtcacgctggggaagtcatgcgttgttttatcccacgccacgcgacgtggatcgccgtgttgaagtacctgttttagcgcgcgccagttggccatgaagttaatcaggttgccccagaaaagacgcaggacggaaagcagcccctgcgtcaggccgtagtagccagtaacgaaaatcacccgctgcacgatgcggttaaccatcaaaccaaagtttagccacagcagggtcattaaccatgcgctgccgctgaaaatagaaaggaaatgccaggcatcgggccacaaactttcatacgccagcaacagcaaaagctggatcatcaccagcatcgcgaggaagctgacaaagttactgattgcccctttgcggtcgcgccagagaaagtagttcagcgtcaggctggaggtccatttatgggttttaaagccttggaaaacaatgccgatgatccagcgggatttttgtcgaaccgcagtgctaaaggtatcggggaaatattcgcgcacgcagatcatgttacttgtccgcgcgtgctgtaaaaatttacgctgctcgcgttctttggcttcgtccaccaccggaaaacggacaaaaatttccgtcatacctttttctttcaggcggaagccaatgtcgtaatcttcagtaagactctgcacgtcgaaagcaataccgtcaccgtcagctaacagtgcggtcacggcgcggcggctgaaacaggtgccgacgcctgcgctgggcacttgtccggcgagggcttcacgcaccggaacatctttgccatgcagctcactaaactcatcaatgtaagtcatgctggtgaagtgcgtccattcgcgttcgaacggatacaccgggatctgaatcagatctttacgctcgaccagatagttgaacagacgcaattccatcggactaatcacatcttcggcgtcatgcagaataaaaccagcaaaagcgaaattggcgctacgctcaaattgggtgatggcgtccagcacgttgttcagacagtcggctttgctggtggggccaggacgcgcgcagactaccttatgcacattcgggaagcgagcgcacacttcgtcaacatcacgctgagtatcggggtcgttggggtaggtgccaacaaagatatgatagttttcgtagtcgagcgtggtcgccgccagctcggccatattgccgatgacgcccgtttcattccacgccggaaccataatcgctaacggtttttcatctggtttatacagttcgcggtaactcattcgcgggtagcggcgataaacactcaacttgcgtttaatgcggcgtacccagtagacgacatcaataaaaaaatcgtccagcccgctgatgaacatgatgaccgctaacgttatcgcgattacttttaagccgtagagccaggtagcaaaaacatcaagaagccagtccacacaaaaaccttacattaacgctggttatgtttagggtggcgtatattaaggttttttatgaattgtgacagctttttaccattaataggtatgactattgcggcacgttatttttacactggttataaaagttgccgtttgctgaaggattaagcgggtaatgtgataacaaaccttgtcccccgcgcatcgctcgttaccgcaaccgtgcctttatgcgcgacaacaatgcttttcactatcgccaggccaataccgctaccttcaccttttcgctggcgggaggggtcaacgcgatagaaacggtcaaacaatcgcggtaagtgctcgggcgcaatgggcgtaccggggttttcgacgataacttgcaccaggtgatcgaccgtctgacagcgcactacaattgtctctccggttggcgtataacgcagggcgttgctaagcaggttgcttagcgcccgacgcagcatcagcggatcgcccgcgacctgacacttgtcgccaacaaaccgcaactccacgccgcgatcttccgctaacgcctcgaaaaaatcgaacactttgccgacttcatccgccaggttgagcattttcttttcggggattagctggttgttatcggcctgagcgagaaacagcatatcgctgaccattttcgccattcgcgtcagctcttcgagattagagtagagcacatcttccagctccttctggctgcggctctggctgagggcgatttcggtttgcgttatgagattcgtaattggtgtgcgaatttcgtgagcgatatccgcactgaaattggactggcgggtaaagacatcctcaatacgctcgatcatatggttgaagctcagtaccagctgttccagctcaatgggcacggtctgcgggtcgaggcgaacgtcgagatctttgctggtaatattctggatttgacggctgacgctgcggatcggcgcgtgacctttatgtaccgccaacagtacgataaagacgatcaggatgctgattacgcttgcggtcataataagtttattcatcaaatcatttatgtaatgaagatgaaaatcgatgctaagcgcgatgtagagcgtataaatcggtttgccgtccaccaacgggccaaccggcaagttaatcatccgccagttgctgtgttccatatgcccgtgaccgtggcctggcatcatcatcgtcgggccggaaaggagatacacctcgccaccctgagcgtctttatcgggtatggcgtcacgcgtaaactcgcggatatccggcgcaccgggggagtgatacaccgttttaccctgactatctgccagggaaatcaacacattggaataaccactgacgatatcttccagcgtcattaagcgtcgggcttgcgtttcgtcagggtgatttagtacccgttcaagggtggcgctaatctcttttaaatcattaatatcctgctcggcaaaatgaacttttacactgtggatcatgatccatgcaaaggcgaaaaacgccgcgatggtggccaggctgataaaaaaggtcaggcgggttgccaggctaaacgggcgctgaaatggcttactgaccatccggcacctcaagcatgtaacccacgccgcgcacggtctgaattagcttcggctcaaagtcgttgtcgattttgccgcgcagccgcttcaccgccacatcaatagcattggtatcgctgtcaaaattcatgtcccatacctggctggcgataaggctgcggggcagcacttcgccctgatggcgaaggaagaactccagcagagtaaactctttactggtcaaagtgatgcgcgtgccgctgcgggtgactttgcggctgacgagatcgaccatcaaatcggcaacctgaaactgactttcgataatcaccgccgccccgcgccgcagtaatgtgcgcacccgcgccagcagttcagcaaaagcgaatggcttcaccaggtagtcatctgcccccaactccagccccttgacgcgatgttcaatggtgccaagcgcggtaagcaacagaatcggcatccctttattggcggagcgtaacatgcgcacgatatcccagccgttcacgtccggcagcataatatcgaggattatcagatcataatcaccggtcatcgccagatggtagccattcagcccgttgtcggccaaatcgaccacaaaaccggcttcggttaaccctttggtcaagtattctccggttttcttttcatcttcgacaatcaacagtttcatatttcctccgcatgttgcccgggcaattctagagtagcgggatcagatggcaatcgcttattggcaaaatgacaattttgtcatttttctgtcaccggaaaatcagagcctggcgagtaaagttggcggcataaaatcaccagaaattatgagcctatgtctccttgtaaacttctgccattttgtgtggcccttgcgctaaccggttgtagtctggcaccggattatcagcgtccggcaatgcccgtgccgcagcagttcagtctcagccagaacggcctggttaacgcagcagataactatcagaacgcgggctggcgcaccttttttgttgataatcaggtgaagacgctgattagcgaggcgctggtgaataatcgggatttgcgcatggcgacgctgaaagtgcaggaggcacgggcgcaatatcgtctgaccgatgccgaccgctacccacagctcaatggcgagggcagcggcagctggagcggtaatcttaaagggaataccgccacgacacgggagtttagcaccggccttaacgccagctttgacctcgattttttcggtcgcttaaagaacatgagcgaagccgagcgacaaaattatttagccactgaggaagctcagcgcgcggtgcatattctgctggtttctaatgtcgcgcaaagctatttcaatcagcaactggcgtatgcgcaattgcaaatagccgaagaaacgctgcgtaattatcagcagagttatgcgtttgtcgaaaaacaactgttgacaggtagcagtaatgttctggcgctggaacaggctcgcggggtgatagaaagtacccgcagcgacatcgctaaacgtcagggggaactggcgcaggcgaataatgcattgcaactgttgctgggaagctacggcaagctgccgcaagcgcagacagtaaacagcgacagcctgcaaagcgttaaattaccggcgggattgagcagccaaatcttattgcagcgcccggatattatggaagctgaacacgcgttaatggcggctaatgccaatattggcgctgcacgcgcggcattttttccgtctataagcctgaccagcggaataagcaccgccagtagcgatctaagcagtttatttaacgccagcagcgggatgtggaattttatacccaaaattgagatccccatttttaatgccggacgcaaccaggccaatctggatatcgccgaaattcgccagcagcagagcgtggtgaattatgaacagaaaatccagaacgcctttaaagaagtggcagatgcgctggcattacgtcaaagcctgaacgatcaaattagcgcccagcagcgttatctggcaagcctgcaaattactttgcaacgggcgcgggcattatatcagcacggcgcagtaagttatctggaagtgctggatgccgagcgttctttatttgcaacccgacaaactttacttgatctgaattatgcccgtcaggttaacgaaatttctttgtataccgcacttggtggcggttgacagcaatatactcgtcatacttcaagttgcatgtgctgcgtctgcgttcgctcaccccagtcacttacttatgtaagctcctggggattcactcgcttgtcgccttcctgcaactcgaattatttagagtatgacttttaactccaggagagaataaatgaaaaaagcactgcaagtcgcaatgttcagtctgtttaccgttattggctttaatgcccaggctaacgaacatcatcatgaaaccatgagcgaagcacaaccacaggttattagcgccactggcgtggtaaagggtatcgatctggaaagcaaaaaaatcaccatccatcacgatccgattgctgccgtgaactggccggagatgaccatgcgctttaccatcaccccgcagacgaaaatgagtgaaattaaaaccggcgacaaagtggcgtttaattttgtccagcagggcaacctttctttattacaggatattaaagtcagccagtaacccaggtttaatgagatgaaaaaaatcgcgcttattatcggcagcatgatcgcgggcggtattatttctgcggcaggttttacctgggttgcaaaggcggaaccgcctgcagaaaaaacgagcaccgcagaacgtaaaatcttattctggtacgacccaatgtatcccaatacgcggttcgataaaccaggtaaaagcccgtttatggatatggatctggtgccgaaatatgccgatgaagagagttctgcgtctggtgtgcgcattgacccgactcagacgcagaatctgggggtgaaaacggctaccgtcacgcgcggaccgctgacttttgcccagagtttcccggcgaatgtcagttacaacgagtatcagtatgccattgtgcaggctcgcgctgccgggtttatcgacaaggtgtatccgcttaccgtgggcgataaagtacaaaagggcacaccgcttctcgacctgaccattcctgactgggtggaagcgcagagtgagtatttactgctgcgcgaaaccggcggtacggcgacccagactgaaggcattcttgagcggctgcgactggcgggaatgccggaggcggatattcgccgcctgatcgccacgcaaaaaatccagactcgctttacgctcaaagcgcccattgatggcgtgatcaccgcgtttgatctgcgcgcgggaatgaatatcgccaaagataacgtggtagcgaaaattcagggtatggacccggtgtgggtcactgctgcgatcccggagtctatcgcctggctggtgaaagatgccagccagtttaccctcaccgttccggcgcgaccggataaaacactcaccatccgcaaatggacgctgctacctggcgtggatgccgcgacccgcacgctgcagctgcgtctggaagtcgacaacgccgacgaggcgctaaaaccgggcatgaacgcctggttgcaactcaacaccgccagcgaaccgatgctgctcattccgagtcaagcgctgattgataccggcagcgaacagcgggtgattaccgttgatgccgacgggcgctttgtaccgaaacgcgttgctgttttccaggcaagccaaggcgtcaccgcattacgctctggtctggcggaaggtgaaaaggtggtttccagcggcctgttcctgattgattccgaagccaatatttctggcgcactggagcggatgcgctctgaaagtgcgacccatgcgcattgagggaataaccaatgattgaatggattattcgtcgcagcgtggcgaaccgttttttggtgctgatgggcgcgttgtttctgagcatctggggcacctggaccatcattaatacgccagtggatgcgctgccggatctctccgatgtgcaggttattattaaaaccagctatcccggtcaggcaccacaaatcgttgaaaatcaggtgacttatccgctaaccaccaccatgttgagcgtgcctggcgcgaagactgtgcgcggtttcagtcagtttggcgactcttatgtgtatgtcattttcgaagatggcaccgatccgtactgggcgcgtagccgggtgctggagtacctcaaccaggtacagggtaagctgcctgcgggagtcagcgccgagctggggccagatgccacgggtgttggctggatctatgaatatgcactggtggatcgcagcggtaagcacgatctggccgatttacgcagtttacaggactggtttctcaaatatgagctgaaaaccatccctgacgttgcggaagtggcgagcgtgggcggtgtggtgaaagagtatcaggtggttatcgatccccagcgcctggcgcagtatggcatcagtctcgccgaagtaaaaagcgcgctggatgctagtaaccaggaagcgggcggtagcagcatcgaactggcggaagcggaatatatggtgcgcgccagcggctatctgcaaacgctcgacgactttaatcacatcgctttaaaagccagtgaaaatggcgtgcccgtttatctgcgcgatgttgcgaaggtccagattggcccggagatgcgccggggcattgccgaactaaacggcgaaggcgaagtggcgggcggggtggtgatcctgcgatccggcaaaaacgcccgagaagtgatcgccgccgtgaaggacaaactggaaacgctgaaaagtagtctgccggaaggcgtggagatagttacaacatacgatcgcagccagctcattgaccgcgccatcgacaacctcagcggcaagttgctggaagagtttattgtggtggcggtagtctgtgcgctgtttctctggcatgtgcgcagcgcgctggtggcgattattagcttgccgctggggttgtgtattgcttttattgtcatgcacttccagggactgaatgccaatattatgagcttgggtggcattgcgattgccgtcggggcgatggtcgatgctgctatcgtcatgatcgagaatgcgcataaacggctggaagagtggcagcaccagcatcctgacgccacgctggataataaaacgcgctggcaggtgatcaccgatgcgtctgttgaagtggggccggcgctatttatcagtctgctgattatcacgttgagctttatcccgatcttcaccctggaagggcaggaagggcgtctgtttggcccgttggcgttcaccaaaacgtatgcgatggcgggtgcggcgctgctggcgatcgtagtgatcccgatcctgatgggctactggatccgtggcaaaattccgccggaaagcagtaacccgctcaatcgctttttgattcgtgtttatcatccgctgtcgctgaaagtactgcactggccgaaaaccacgctgctggtggcggcgcttagcgtgctgacggttctctggccgctcaataaagttggcggggaatttttaccgcagatcaatgaaggcgacttgttgtatatgccaagcacgctgccggggatttccgcagcagaggcggcgagtatgctgcaaaaaaccgacaagctaattatgagcgtacctgaagtggcgcgggtatttggcaaaaccgggaaagcggaaaccgccaccgattctgctccgctggagatggtagaaacgaccatccagcttaagccgcaggagcagtggcggccaggcatgacgatggacaaaatcattgaggaactggataacaccgtgcggctgccggggctggcgaatctgtgggtgccgccaattcgtaaccgtatcgatatgctcagtaccggcattaaaagccccatcggcattaaagtttccggcactgtgctggcggatatcgacgcgatggctgagcaaattgaagaagtagcgcgaacggtgccaggcgtagcttctgcgcttgccgagcggctggaaggtgggcgctatatcaacgttgagattaaccgtgaaaaagccgcacgttacggtatgacggtggcggatgtgcagttgtttgtgacttctgcggtgggcggggcgatggttggcgaaacggtggaagggattgcccgttatccaattaatctgcgttatccgcaaagctggcgcgatagtccgcaggcactgcgccagctgccgatcctgacgccgatgaagcagcaaatcaccctggcagacgtggccgacattaaagtctctaccggaccgagcatgctgaaaaccgagaatgcgcgcccgacgagctggatttatatcgatgcccgcgatcgtgacatggtgagcgtggttcacgatttgcaaaaagcgatagctgaaaaagtgcagttaaaaccgggcaccagcgtggcattctccgggcagttcgagctactggagcgcgccaaccataagcttaaactcatggtgccgatgacgttgatgattatcttcgtgctgttgtatctggcgttccgtcgggtgggcgaagcgttgctgattatcagcagcgtaccgtttgcgctggtgggcggcatctggttgctgtggtggatgggctttcatctttccgtggcgacgggcactggctttatcgccctcgccggggtcgccgccgaatttggcgtggtgatgctgatgtatttacgtcacgccatagaggccgtgccgagcttgaataatccacaaacattcagcgagcagaagctggatgaggcgttatatcacggcgcggtcctgcgcgtgcgcccgaaagcgatgacggtggcggtgattatcgccggtctgctgccgattctgtggggaacgggggctggtagtgaggtgatgagccggattgccgcgccgatgattggcggcatgatcaccgcacctttgctgagcctgtttattatcccggcggcgtataagctgatgtggctgcaccgacatcgggtacggaaataaaagcaggataccccgtttaaccgtgtggattgtgtcttgcgacgatgggcactaaatgttaaaaggtgcccctcaacaaaaaagacacacaggggaaaggcgtgaaaaacgcgagtaccgtaagcgaagatactgcgagcaatcaagagccgacgcttcatcgcggattacataaccgtcatattcaactgattgcgttgggtggcgcaattggtactggtctgtttcttggcattggcccggcgattcagatggcgggtccggctgtattgctgggctacggcgtcgccgggatcatcgctttcctgattatgcgccagcttggcgaaatggtggttgaggagccggtatccggtagttttgcccactttgcctataaatactggggaccgtttgcgggcttcctctctggctggaactactgggtaatgttcgtgctggtgggaatggcagagctgaccgctgcgggcatctatatgcagtactggttcccggatgttccaacgtggatttgggctgccgccttctttattatcatcaacgccgttaacctggtgaacgtgcgcttatatggcgaaaccgagttctggtttgcgttgattaaagtgctggcaatcatcggtatgatcggctttggcctgtggctgctgttttctggtcacggcggcgagaaagccagtatcgacaacctctggcgctacggtggtttcttcgccaccggctggaatgggctgattttgagcctggcggtaattatgttctccttcggcggtctggagctgattgggattactgccgctgaagcgcgcgatccggaaaaaagcattccaaaagcggtaaatcaggtggtgtatcgcatcctgctgttttacatcggtagtctggtggttttactggcgctctatccgtgggtggaagtgaaatccaacagtagcccgtttgtgatgattttccataatctcgacagcaacgtggtagcttctgcgctgaacttcgtcattctggtagcaagcctgagtgtgtataacagcggggtttactctaacagccgcatgctgtttggcctttctgtgcagggtaatgcgccgaagtttttgactcgcgtcagccgtcgcggtgtgccgattaacagcctgatgctttccggagcgatcactagcctggtggtgttaatcaactatctgctgccgcaaaaagcgtttggtctgctgatggcgctggtggtagcaacgctgctgttgaactggattatgatctgtctggcgcatctgcgttttcgtgcagcgatgcgacgtcaggggcgtgaaacacagtttaaggcgctgctctatccgttcggcaactatctctgcattgccttcctcggcatgattttgctgctgatgtgcacgatggatgatatgcgcttgagtgcgatcctgctgccggtgtggattgtattcctgtttatggcatttaaaacgctgcgtcggaaataaggcattcacgctacatccgacaaaacgatgtcaaccatccgaaaccgctctcatccattcgatgagagcggtttttttaattactgcttaaatgcacccgccagagagcgaatatcattgccggttggcgagtaatccccgcatatccggttgtcaggtcaggatggtaaggcacctgctttacactttcgcccgtggtcagtgatggctgcgggcgaatcgtaccagatgttgtcaattaatcgtgttggcacagcgttatgactatcttttcttttatctgccagtgcacagcaaacatctcattctcacgatgaatgatgacctgctgtttattccagctaattatctgatagtccagaaaacctgcatcagtttggatctcacttgccttaaatgcgctctctttggcggaaaatgccagtgtcagcgccagagaaaaggctaaaccgcagtctgcgagtcgctcgtgttccgctggtgtaataatgttgtctgtcaattctcttgcggtttgtacagaaaaaatttcttctatatcaatgccaatcggttgacgagataccacggctaatgccgtagtcccacagtggctaatactgccgtatacctccgcaggccagacaggttggcgtagctcgccgattgcgggcacacatttatagccatattcccgcaaagcataaacagcagcgatccgtccggctaaatgctctgttttacgtttacgtccagcgtgttgcagttgtgcgtagtgcggcagccagagtaaatcctgttcacaaaaattcgccggatcgaactcaacaaaatgcagcgtatgtccggcaaaggggagggaggtatgcgtagttttcatatcgaccatattcgagactgatgacaaacgcaaaactgcctgatgcgctacgcttatcaggcctacatggtcctgcaatatattgaattggcaagatttttgtaggccggataaggcgttcacgccgcatccggcatgaacgacgcgcactttgtcaacaatctgacgttagcatcagaagtgggtgtttacgctcatataccacgtacgtcccggctcgttataggtatacgccccggcaccggcgatatagttggcccctgccgaatcgcccgtggtctgggcattacccgcacgccacaaacgtttgtcgaacagattgtccacgccgccggtcagactgacattcttcgtcacatcccaggtcgcgctcaggccaacaatgctgtaaggactaatttctttggtttccggtccaaccgctggctgacctttatagttgtacttcttcggctgctgcttgccgtaccaggtgaaggtcgtttgcatgctcaaatcttcccgtgcctgccagctcagcgtactgttcaacgtatactccgggatgatgctcaaacggtcgcccgtggttttgttttcactcttcagcatataagtgatgttattggtccacatcaccgtttcgctaaccggtacgtttaagcttccttccagaccttcaaccaccgctttcggcacgttatcccactgatagagatcggtgccgactgcgttttgccctacagccacatagcccgcttcaatcttattgcgataatcgttacggaaccaggtgacgcccgccagccacccgtcgcgtttgaactccagaccaatctctttgttgatgctggtttctgctttcaggtcatcgttaccttgcagatagcagccgcccgcgctggcatagcaaccctgacctttactgtagagaatgtagttcgggttagtctggtacaggctcggcgctttataagcacgggcgatgcccattttcagcgtgaagtcatcgcctaaaccttggcttatgttcagcgccgggctccagttattgccgacaatactgtgatgatcgaaacgcagccccggcgttacgatggtgctgtcagtcagctccatgttgttttcggcaaacaggctgaaaatttctgctttactatacgggctacggtcggtggtactcacgccatcaatagcgccaccggtattcgttccggtcagtgcctgggtgttggaacttaagtccttcatccgttgctgattccactccgtacccagcgtcagcgtctggttaacgaggaaatcaatcggcaggttaacttcgctgtgcagcatcacgtcatcaagatcgatatcgacgaaatcctgtgtcgctttttcgttaaatttcccttcggtaccgcccgccagaccttccggaatacggctgttacgggtgtgttcgtactgcacccagttgctggtggtcacgccgttatcccagccaccgttccaggtcagcgcgtagttctggcgatacagacggttggtttcatcgccatatttgctgcgggtataggaatcggagttggtattctgggtgtcgcccgcatacaggttaccctggcggctgtaacctgcttccagttccaggctttgcaatggcgcgaaatcccagcgcaccacgccattaatatctttgttgattaccccttcgcgcccggctggtaacgtcgtggcatacgttccggcacgcgcggactgatggccctggttgatatcccacgcgtcagcctgggttttgtcgaggttgccatacaaacggaagctgaattcgtcgcccagcggaccggtcaggctaaagttagtgcgtttggtggcaccttcctctttatgttctggcgcattgaaatatgcgtcccaggagccgtgccactcgccgctgccttttttggtaatgatgttaaccacgccgcccgccgcgccgttgccataacgcgcagctgccggaccacgcagaacttcaatacgttcaatcatttcaggtggcacccaggaagtatcaccacgggtatcgcgctcgccacgccagccctgacgcacgctgttacggctgcttaccggcttgccgtcaatcaaaatcagcgtgttttccggacccataccgcgaatatcaatctgtcggttattcccacgctgaccactggtggagttaccggtcaggttaacgcctggcatggtacggatgatcttgctcacatcgcgggcaaccgggtttttgcggatttcatctgcggtgatggtgctaacgccaggcgcctgtaagttctgctcggcggcggtaacgacaatagtatcgtcatgactaacaggagtatcggtcggctcttgtgcctgcgctaccccataaatccccagattgaccaacaaggccagggaatgaatcttcttgttcattgttttattcctgcatttttgccacgaattgcaactgtcgggcatggtcgtcatcaacacgacgcatcccgctaccgcgaaaacctttgatcctgaaagacacgcagtgcagttggttaattaatgtccgcgcttcccacggcgcgccattacgctattgcaaatgcaaatagttatcaataatattatcaatatatttctgcaatcaatgaaaaattgcacagtaaacatggggttatggtgtgacggcgttaaaagtaggaagtgagagctggtggcagtcgaaacatggcccggaatggcagcgtctgaatgacgaaatgtttgaggtcactttctggtggcgtgatccccaaggttctgaagaatacagcacgataaagcgcgtatgggtctacatcactggtgtgaccgatcaccatcagaacagccagccccagagcatgcagcgaattgcaggcactaacgtctggcagtggacgacacaactcaatgccaactggcgcggcagctactgctttattcccaccgaacgcgatgacattttttctgtaccatcccccgatcgcctcgaattgcgcgaaggctggcgaaaactattaccccaggcgatagccgatccgctgaacctacaaagctggaaaggcgggcgagggcacgctgtttctgcactcgaaatgccgcaagcgcctctgcaaccgggatgggattgtccgcaagcgccagaaatacctgccaaagaaattatctggaaaagtgaacggttgaaaaagagtcggcgtgtatggatttttaccaccggcgatgcaacagcagaagaacgcccgctggcagttttgctcgatggcgaattttgggcgcaaagtatgcccgtctggccagtgctgactagcctgacccatcgtcagcaacttcctcccgccgtgtatgtgttgatcgacgctatcgacaccacgcaccgcgcccacgaactgccgtgtaatgcggatttctggctcgcagtacagcaagagttattacccctggtgaaagctattgccccttttagcgatcgtgccgatcgcaccgtggttgccgggcagagttttggtgggctttccgcgctgtatgccggactgcactggcctgaacgctttggctgtgtattaagccagagtggaagctactggtggccgcatcggggcgggcagcaagagggcgtgttacttgaaaagctaaaagctggtgaagttagcgccgaaggtctgcgcattgtgctggaagcgggtattcgcgagccgatgatcatgcgggccaatcaggcgctgtatgcgcaattacaccccataaaagaatccattttctggcgtcaggttgacggcggacatgatgcgctttgttggcgcggtggcttgatgcaggggctaatcgacctctggcaaccacttttccatgacaggagttgaatatggcattcagtaatcccttcgatgatccgcagggagcgttttacatattgcgcaatgcgcaggggtaattcagtctgtggccgcaacaatgcgtcttaccggcaggctgggacattgtgtgtcagccgcagagtcaggcgtcctgccagcagtggctggaagcccactggcgtactctgacaccgacgaattttacccagttgcagaaggcacaatgagccagcatttacctttggtcgccgcacagcccggcatctggatggcagaaaaactgagtgaattaccctccgcctggagcgtggcgcattacgttgagttaaccggagaggttgatagcccattactggcccgcgcggtggttgccggactagcgcaagcagatacgctgcggatgcgttttacggaagataacggcgaagtctggcagtgggtcgatgatgcgctgacgttcgaactgccagaaattatcgacctacgaaccaacattgatccgcacggtactgcgcaggcattaatgcaggcggatttgcaacaagatctgcgcgtcgatagcggtaaaccactggtctttcatcagctgatacaggtggcggataaccgctggtactggtatcagcgttatcaccatttgctggtcgatggctttagtttcccggccattacccgccagatcgccaatatttactgcacatggctgcgtggcgaaccaacgcctgctagcccatttacgcctttcgctgatgtagtggaagagtaccagcaataccgcgaaagcgaagcctggcagcgtgatgcggcattctgggcagaacagcgtcgtcaactgccgccgcccgcgagtctttctccggcacctttaccggggcgcagcgccagcgcagatattctgcgcctgaaactggaatttaccgacggggaattccgccagctggctacgcaacttagtggtgtgcagcgtaccgatttagcccttgcgctggcagccttgtggctggggcgattgtgcaatcgtatggactacgccgccggatttatctttatgcgtcgactgggcagcgcggcgctgacggctaccggacccgtgctcaacgttttgccgttgggtattcacattgcggcgcaagaaacgctgccggaactggcaacccgactggcagcacaactgaaaaaaatgcgtcgtcatcaacgttacgatgccgaacaaattgtccgtgacagcgggcgagcggcaggtgatgaaccgctgtttggtccggtactcaatatcaaggtatttgattaccaactggatattcctgatgttcaggcgcaaacccataccctggcaaccggtccggttaatgaccttgaactggccctgttcccggatgtacacggtgatttgagtattgagatcctcgccaataaacagcgttacgatgagctaacgttaatccagcatgctgaacgcctgaaaatgctgattgcccagttcgccgcggatccggcgctgttgtgcggcgatgtcgatattatgctgccaggtgagtatgcgcagctggcgcagctcaacgccactcaggttgagattccagaaaccacgcttagcgcgctggtggcagaacaagcggcaaaaacaccggatgctccggcgctggcagatgcgcgttacctgttcagctatcgggaaatgcgcgagcaggtggtggcgctggcgaatctgctgcgtgagcgcggcgttaaaccaggggacagcgtggcggtggcactaccgcgcagcgtctttttgaccctggcactccatgcgatagttgaagctggagcggcctggctaccgctggataccggctatccggacgatcgcctgaaaatgatgctggaagatgcgcgtccgagcctgttaattaccaccgacgatcaactgccgcgctttagcgatgttcccaatttaacaagcctttgctataacgccccgcttacaccgcagggcagtgcgccgctgcaacttagtcaaccgcatcacacggcttatatcatctttacctctggctccaccggcaggccgaaaggggtaatggtcgggcagacggctatcgtcaaccgcctgctttggatgcaaaatcattatccgcttacaggcgaagatgtcgttgcccaaaaaacgccgtgcagttttgatgtcagcgtgtgggagtttttctggccgtttatcgcaggggcaaaactggtgatggctgaaccggaagcgcaccgcgacccgctcgctatgcagcaattctttgccgaatatggcgtaacgaccacgcactttgtgccgagcatgctggcggcatttgttgccagcctgacgccgcaaaccgctcgccagagttgcgcgacgttgaaacaggttttctgtagtggtgaggccttaccggctgatttatgccgcgaatggcaacagttaactggcgcgccgttgcataatctatatggcccgacggaagcggcggtagatgtcagctggtatccggcttttggcgaggaactggcacaggtgcgcggcagcagtgtgccgattggttatccggtatggaatacgggtctgcgtattcttgatgcgatgatgcatccggtgccgccgggtgtggcgggtgatctctatctcactggcattcaactggcgcagggctatctcggacgccccgatctgaccgccagccgctttattgccgatccttttgccccaggtgaacggatgtaccgtaccggagacgttgcccgctggctggataacggcgcggtggagtacctcgggcgcagtgatgatcagctaaaaattcgcgggcagcgtatcgaactgggcgaaatcgatcgcgtgatgcaggcgctgccggatgtcgaacaagccgttacccacgcctgtgtgattaaccaggcggctgccaccggtggtgatgcgcgtcaattggtgggctatctggtgagccaaagcggcctgccgttggataccagcgcattgcaggcgcagcttcgtgaaacattgccaccacatatggtaccggtggttctgctgcaacttccacagttaccacttagcgccaacggcaagctggatcgcaaagccttaccgttgcctgaactgaaggcacaagcgccagggcgtgcgccgaaagcgggcagtgaaacgattatcgccgcggcattcagcagcttgctggggtgtgacgtgcaggatgccgatgctgatttcttcgcgcttggcggtcatagcctactggcaatgaaactggcagcgcagttaagtcggcaggttgcccgccaggtgacgccggggcaagtgatggtcgcgagtactgtcgccaaactggcaacgattattgatgctgaagaagacagcacccggcgtatgggattcgaaaccattctgccgttgcgtgaaggtaatggcccgacgctgttttgtttccatcctgcgtccggttttgcctggcagttcagcgtgctcagccgttatctcgatccacaatggagcattatcggcattcagagtccgcgccccaatggccccatgcagacggcggcaaacctggatgaagtctgcgaagcgcatctggcaacgttacttgaacaacaaccgcatggcccttattacctgctggggtattcccttggcggtacgctggcgcagggtattgcggcgcgactgcgtgcccgtggcgaacaggtggcatttcttggcttgctggatacctggccgccagaaacgcaaaactggcaggaaaaagaagctaatggtctggacccggaagtgctggcggagattaaccgcgaacgcgaggccttcctggcagcacagcagggaagtactagtacggagttgtttaccaccattgaaggcaactacgctgatgctgtgcgcctgctgacgactgctcatagcgtaccgtttgacggtaaagcgacgctgtttgttgctgaacgcacacttcaggaaggtatgagtcccgaacgcgcctggagcccgtggatagcggagctggatatctatcgtcaggattgtgcgcatgtggatattatctctccagggacgtttgaaaaaattgggccgattattcgcgcaacgctaaacaggtaaattaatattatttataaacccataattacagaaaataattatgggttttttatttgtttgatttataggtttgatgaatatttctcttaaatagagtgaatgttgcattcagtggaaggaatttacaaacttcagcttcggataattatcaccaactggtaaagtgagcgccgtggagatttccccctattggactcattttcaggttataccccatgagtagtctgaatattaaacagggaagtgacgctcattttcccgattatcctctggcgagccccagtaataatgaaattgatttacttaatctaatcagtgttttatggcgggccaaaaaaacggtcatggcggtcgtttttgcgtttgcctgcgcaggcttgctgatctctttcatcctgccgcaaaaatggaccagcgcggcggttgtcacgcctccagaacctgttcagtggcaagagttggagaaaagtttcactaagcttcgtgtgctggatctggatatcaaaattgatcgtacagaagcatttaacctgtttatcaagaagtttcagagcgttagcttgctggaagagtacctgcgtagtagtccttatgtgatggaccaattaaaagaggcgaaaatcgacgaactggatttgcatcgcgcaattgtcgcattgagcgaaaaaatgaaagcggttgatgacaatgccagtaagaaaaaagatgaaccgagtctgtatacctcctggacgctaagttttaccgcgccaaccagtgaagaggcgcagaccgttttgagcgggtatatcgattatatctctacgttggtggtgaaagagagcctagaaaacgtccgtaataaactggagatcaaaacccagtttgaaaaagaaaaactggctcaggatcgcattaaaacgaaaaatcaacttgatgcaaacattcagcgcctcaattatagtctcgacattgccaacgcggcaggaattaaaaagcccgtttacagtaatggtcaggccgttaaagatgaccccgatttttctatttctctcggtgcagacggtattgaacgcaaactggaaatagaaaaagcggtcactgacgttgcggaactgaacggtgaattacgtaatcggcagtatcttgtcgagcaattaacaaaagcacatgtcaacgatgtgaattttacgccgtttaaatatcagttaagcccgagtttgccagtgaaaaaagacggtccgggtaaggcgattattgtgatcctttccgcgttgatcggcgggatggtggcttgtggtggcgtgctgttgcgctatgcgatggcatccagaaaacaggatgccatgatggcagaccacttagtttaactatttgcggtactaggtgccgttcgtccgagcggcaccacaagcggcgttccggcaactggatcgtcaatgatcatgcagcgcagaccataaatgcgctcaatcagttcagcagtgacaatctccttcggcgctccctgagcaacaattttcccttcccgcaatgcaatcaaatggctggcgtaacgacaggcctgattaagatcgtgcagcaccgccgccagggtatagcctttttcgcggttcagttcgcttaacaactccagcaaatcaatctgatgactgatatccagccaggtcgtgggttcgtcgagcagcataattgccgtttcctgggccagcaccatcgcgatccacgctcgctggcgttgtccgccagaaagggtatccacgctttgatctgccagatgagttattcccgtggcctgcattgctttcgttaccgcttcttcatcctctttgcgccagcgggtaaacagcggttgatgcggataacgtccacgcgccaccagctcctgcacggtgatatcgcccggcgtggtagcattttgcgccaacagaccaatccggcgtgcaacctctttactggcgtaatgttgaatgtgctcgccatccagccagacatgcccatgagcaggcgtcatcaggcggcttaaggtacgcagtaacgtggatttaccgcagccatttggcccgataattgccgtgaagtgaccatcaggtatttctacagtcagattttccgcaacggtatatttgccatatcccagggttaactgttcgccgcgcaaacgggctacactttcggtcattttttgcgagactcctgaattaacaagacgataaggtaaataccgccgaggctgacggtaacgacgccaaccggaagttgatacggcataaacagttgttgggcgcagagatcggccgccagcagtaacagcgccccgcatagcgccgcctgggttagcccccagcgagcggtgccgctaatgcgtcgggcaatgtgcggtgcgactaaagcaataaaggaaatcggcccggcaagcgctgttgccgcagcggtaagcaccactgcaaccagcatcattaacagacggctacgttcgacgctgacgcccagcgcacacgcggtatcatcgcccatttccagcaagcgcatccggcgtaccagtaaggcggcggcaatgagcatcaatataatgatgggtgcggaagggctggtttttgcccacgtcaggccgttgaggcttccggcattccacaaacctgctgttagcgccgtttctaaagacgctttcagcaacagccaggtattaaaggccaccagcatggcgcgaacgccgataccgataataatcaaccgaaaggtgtcgatgccgttgcgccaggcgagcagccagaccagcaggctagtgacaatgccgcccaccattgcactcagcgcgatagccgtcaggtcctgaccaaacagcaccatcgccaccagcacgccgctccacgccccggtgttaaagcccattacgtcagggctgccgagcgggttacgcatcaggctctgaaaaatcgcgccactgacgcccagtgctgcgccaatcaacagcgccatcagcacgcgtggtaaacgccattcggtgaccaccatcgtcatactgcgcggcgcatcgcccatcagcgcggcgaatacctggctggtttccagcgtgacggcaccgctgcgtaatccccagatacctgcaaccacacaggcggaaaccagcagcaaacaggtgatgagtaatcggcgagagacgtaaatcatgcaccacctcgcgttttacgtcgcacgaggaagatcagcaccggtgcaccaataaacgcactgaccacagaaacgcgcagttcgccgggcacaatcacccgcccgatgatatcggcaaacagcagcagggcaggggtagcaagtagcgtgacgggcaggctccagcgatgatcggcacccaccagccaacgcgccatatgcggcatcatcaggccaataaaggcaatcgggccaactattgccgtcgcactaccacaaagcacggtaatcgccagcagaccaatcaactgtgtgcgcgccacgcgactgcccagcgccgtcgcggtgtcgctgccgaggctcaaactgttcagcgcgcgactcagtaatagcgcagttgctccggcgatcagcaccgggatcagcaccacttttaaggtatgtagattgcgaatatccaggctaccggcttgccagaaacgcaactgatcgtagacgtcaggattaagcagggcgatgccgctggtcagtccttccagcaccgccgccagcgccacgcccgccagggttaaacgcaccggacttaactgcccgccgccctgactgccggtaaaggcaacaatcaaactggccaccagcgccccggcgaaggccatcgccagttgttcctgcgcggaagagtaaccaaacagcgccgcacccagcacaatggcaaagctggctccggcgttcacgccaagcaagccggggtcggcaagtgggtttcgggtgagggtttgcattaacgccccggcaaggccaagcgcgccgcctgccagtaaaccggcaagggtacgcggcagccgcgcgtcgagcacgatggtgcagtcggcgctctggcaggtgccggagaaggcctccagcactacggaagcggggagactttttgccccaatgagcaggcttaatgccgtcgcgataatcagtaataacagcaatccgggcacggcaatggcgcgtgtcacggcaacagaaccagacatacgaacttccatgataatgaaattaattatcgttatcgatcttatttggatatgttagcatgtgcagcctaagaataggtatttaaaatatttgatggcaaggcattgtaatgaataaacaatcctggctgcttaacctcagcctgttgaaaacgcacccggcgtttcgcgcagtattcctcgctcgtttcatcagtattgtgtctctgggtttgctcggcgtcgcggtgccggtgcagatccagatgatgacacattccacctggcaggtggggcttagcgtgacgctgaccggcggcgcgatgtttgttggcctgatggtcggcggtgtgctggcggatcgctatgagcgcaaaaaagtgattttgctggcgcgcggcacctgtggcattggcttcattggactgtgccttaatgcactgctgccggagccgagtttgctggcaatctatttacttggtttatgggatggttttttcgcaagccttggcgttacggcgctattggcggcgacaccagcactggtagggcgtgaaaacttaatgcaggccggggcgatcaccatgttgaccgtgcgtctggggagcgtgattagccccatgattggcggtttattgctggcgaccggtggcgtagcctggaactacgggctggcggcggcgggcacgtttattaccttgctaccgttgttaagccttccggcgttgccaccgccaccgcagccgcgtgagcatccgttgaaaagtttactggcaggatttcgttttctgcttgccagcccgctggtgggcgggattgcgctgctgggtggtttattgacgatggcgagcgcggtgcgggtactgtatccggcgctggctgacaactggcagatgagtgcggcacagattggttttctctacgcggcgatcccgctcggcgcggctattggtgcgttaaccagcgggaagctggcacatagtgcgcgaccagggttattgatgctgctctccacgctgggaagcttcctcgccattggtctgtttggcctgatgccgatgtggattttaggcgtggtttgtctggcgctgttcggctggttgagtgcggtcagcagcttgctgcaatacacaatgctgcaaacgcaaaccccggaagcgatgttagggcggattaacggtttgtggacggcgcagaacgtgacgggcgatgccataggcgcggcgctgctgggtggtttgggcgcgatgatgacaccggttgcttccgcaagcgcgagcggttttggtttgttgattatcggcgtgttgttattgctggtgctggtggagttgcgacattttcgccagacgccgccgcaggtgacagcgtccgacagttaatgcttaaaacagcgccttaagcctatccagcacttgcatggcgctgtagtaatccagacggaacgtctcggttcccagcgcataaacctgcttgttttgtactgcaggcaggtgcgcgagcagcggattagcataaatagcatcggcatctttctgatcaccggcgaacaggaatagactctcgccatttaaccctgcagccagattttccccaccaagctgaatgatgtcatggcgtttaccctgactttggctggcatttaaccctgcgggtaacttcgccagcgtaaagccgagttgttccagcatctgcccttgtgcactttctggcgtccagagattggcactgtgtgcagcggcagtatagacaatggcagtgaccggctgcggcggtaatttgatttgctctttcgccgccgccagttgcttatcaaactgcgcaatccgctctgccgcttgtttctcatgcccggtaatttcgccaagttgcgttaacaggctctgccagcttttgtcgtcgtaattgatgattaatgtcggggcgatggtggaaagctgatcatacagtgccagcgcgctatccccgccggttgcgctaattaaaatcagatccggcatttgcgcggcaacggcttcggcgctcggttcgccgatatagagccgttgcagtttgcgttctttcgccaccttgctccactggcgtaaaaagccctggtcatccgcgacgcggttattcggcgtggtcgcgccgctggcgatcaccggagcatcaatcgccagcagactgccggtcagggtgacgctggtggaaacaatacgctgcggctggctttccagtgtatgtgtgccacggctgtcagtaatctgacgcggccagtcagcggcctgaactgcggctattccactaagcaaaagtcctgttaatagaagggcgttgcggtagagcggggcgagtctcacaaatcagcttcctgttattaataaggttaagggcgtaatgacaaattcgacaaagcgcacaatccgtcccctcgcccctttggggagagggttagggtgaggggaacagccagcactggtgcgaacattaaccctcaccccagccctcaccctggaagggagagggggcagaacggcgcaggacatcacattgcgcttatgcgaatccatcaataatgcttctcattttcattgtaaccacaaccagatgcaaccccgagttgcagattgcgttacctcaagagttgacatagtgcgcgtttgcttttaggttagcgaccgaaaatataaatgataatcattattaaagcctttatcattttgtggaggatgatatggatacgagtctggctgaggaagtacagcagaccatggcaacacttgcgcccaatcgctttttctttatgagcccgtaccgcagttttacgacgagtggatgtttcgcccgcttcgatgaaccggctgtgaacggggatagccccgacagtcccttccagcaaaaactcgccgcgctgtttgccgatgccaaagcgcagggcatcaaaaatccggtgatggtcggggcgattcccttcgatccacgtcagcctagcagcctgtatattcctgaatcctggcagagcttctcccgtcaggaaaaacaagcttccgcacgccgtttcacccgcagccagagcctgaatgtggtggaacgccaggcaattccggagcaaaccacgtttgaacagatggttgcccgcgccgccgcacttaccgccacgccgcaggtcgacaaagtggtgttgagtcggttgattgatatcaccactgacgccgccattgatagtggcgtattgctggaacggttgattgcgcaaaacccggttagttacaacttccatgttccgctggctgatggtggcgtcctgctgggggccagcccggaactgctgctacgtaaagacggcgagcgttttagctccattccgttagccggttccgcgcgtcgtcagccggatgaagtgctcgatcgcgaagcaggtaatcgtctgctggcgagtgaaaaagatcgccatgaacatgaactggtgactcaggcgatgaaagaggtactgcgcgaacgcagtagtgagttacacgttccttcttctccacagctgatcaccacgccgacgctgtggcatctcgcaactccctttgaaggtaaagcgaatagccaagaaaacgcactgactctggcctgtctgctgcatccgacccccgcgctgagcggtttcccgcatcaggccgcgacccaggttattgctgaactggaaccgttcgaccgcgaactgtttggcggcattgtgggttggtgtgacagcgaaggtaacggcgaatgggtggtgaccatccgctgcgcgaagctgcgggaaaatcaggtgcgtctgtttgccggagcggggattgtgcctgcgagcagtccgttgggtgagtggcgcgaaacaggcgtcaaactttctaccatgttgaacgtttttggattgcattaaggagcgaggatgagcattccattcacccgctggccggaagagtttgcccgtcgctatcgggaaaaaggctactggcaggatttgccgctgaccgacattctgacgcgacatgctgcgagtgacagcatcgcggttatcgacggcgagcgacagttgagttatcgggagctgaatcaggcggcggataacctcgcgtgtagtttacgccgtcagggcattaaacctggtgaaaccgcgctggtacaactgggtaacgtcgctgaattgtatattacctttttcgcgctgctgaaactgggcgttgcgccggtgctggcgttgttcagccatcagcgtagtgaactgaacgcctatgccagccagattgaacccgcattgctgattgccgatcgccaacatgcgctgtttagcggggatgatttcctcaatactttcgtcacagaacattcctccattcgcgtggtgcaactgctcaacgacagcggtgagcataacttgcaggatgcgattaaccatccggctgaggattttactgccacgccaagtcctgctgatgaagtggcctatttccagctttccggtggcaccaccggcacaccgaaactgatcccgcgcactcataacgactactactacagcgtgcgtcgtagcgtcgagatttgtcagttcacacaacagacacgctacctgtgcgcgatcccggcggctcataactacgccatgagtagcccaggaagcctgggcgtctttcttgccggaggaacggttgttctggcggccgatcccagcgccacgctctgtttcccattgattgaaaaacatcaggttaacgttaccgcgctggtgccacccgcagtcagcctgtggttgcaggcgctgatcgaaggcgaaagccgggcgcagcttgccagcctgaaactgttacaggtcggcggcgcacgtctttctgccacccttgcggcgcgtattcccgctgagattggctgtcagttgcagcaggtgtttggcatggcggaagggctggtgaactacacccgacttgatgatagcgcggagaaaattatccatacccagggttacccaatgtgtccggatgacgaagtatgggttgccgatgccgaaggaaatccactgccgcaaggggaagtcggacgcctgatgacgcgcgggccgtacaccttccgcggctattacaaaagtccacagcacaatgccagcgcctttgatgccaacggtttttactgttccggcgatctgatctctattgatccagagggttacatcaccgtgcaggggcgcgagaaagatcagattaaccgtggcggcgagaagatcgctgccgaagagatcgaaaacctgctgctgcgccacccggcggtgatctacgccgcactggtgagcatggaagatgagctgatgggcgaaaaaagctgcgcttatctggtggtaaaagagccgctgcgcgcggtgcaggtgcgtcgtttcctgcgtgaacagggtattgccgaatttaaattaccggatcgcgtggagtgtgtggatagtcttccgctgacggcggtcgggaaagtcgataaaaaacaattacgtcagtggctggcgagtcgcgcaagtgcctgaaggagagaacacgatggctattccaaaattacaggcttacgcactgccggagtctcacgatattccgcagaataaagttgactgggcctttgaaccgcaacgtgccgcgttgttaatccatgatatgcaggactattttgtcagcttctggggcgagaactgcccgatgatggagcaggtgatcgcgaatattgctgcgctgcgcgactactgcaaacagcacaatatcccggtttattacaccgcccagccgaaagagcagagcgatgaagatcgggcgctgttgaatgatatgtgggggccgggcctgacccgcagcccggaacagcaaaaggtggtggatcgcctgacgccagatgccgacgacacggtgctggtgaagtggcgctacagcgcgtttcatcgttctccgctggagcaaatgctgaaagagagtggacgtaaccagctgattattaccggggtatatgcccacattggctgtatgaccaccgcaaccgacgcatttatgcgcgatattaaaccgtttatggtggcggatgcgctggccgatttcagccgtgacgagcatttgatgagcctgaaatatgtggccggacgttctggccgggtggtgatgactgaagaattactgccagcacctatccccgccagcaaagcggcgctgcgtgaggtgatcctgccgttgctggacgagtccgatgaaccgttcgatgacgacaacctgatcgactacggtctggatagcgtgcgcatgatggcgctggcggcgcgctggcgcaaagtgcatggtgatatcgactttgtcatgctggcgaaaaacccgaccatcgacgcctggtggaagctactctcccgcgaggtgaaataatggatttcagcggtaaaaatgtctgggtaaccggcgcaggtaaaggtatcggctacgccacggcgctggcgtttgttgaggcgggagcgaaagttacaggttttgatcaagcgttcactcaggagcaatatccctttgcgaccgaagtgatggatgttgccgacgctgcgcaggtcgcgcaagtgtgtcagcgactgttagctgaaacggagcgactggacgcgctggtcaatgcggcgggaattttacgcatgggcgcgaccgatcagctcagtaaagaggactggcagcagacttttgcggttaacgtcggcggtgcgtttaacctgttccagcaaaccatgaaccagtttcgccgtcagcggggcggggcgattgtcactgtggcgtccgacgccgcgcacacgccgcgtattggcatgagtgcttatggcgcaagcaaagcggcgctgaaaagcctggcgttgagcgtcgggctggaactggcgggtagcggcgtgcgctgtaatgtggttagccctggctccaccgacaccgatatgcaacgcacgctgtgggtgagcgatgacgccgaagaacagcgtattcgcggctttggcgagcagtttaaactcggcattccgctggggaaaatcgcccgtccacaagagatcgccaacacgattttgttcctcgcctctgacctcgccagccatattaccctacaggatattgtggtcgatggcggcagtacgctgggggcataagcatgatctggaaacgccatttaacgctcgacgaactgaacgccaccagcgataacacaatggtggcgcatctgggaattgtgtatacccgtctgggcgatgatgtgctggaagccgaaatgccggttgatacccgtactcatcagccgttcggtttactacatggcggcgcgagcgcggcgctggcggaaacgctgggaagcatggccggatttatgatgacccgcgacggacagtgtgtggtaggcacagaacttaatgcaacacaccatcgcccggtgtctgagggaaaggtacgcggcgtctgccagccgctgcatcttggtcggcaaaatcagagctgggaaatcgtcgttttcgatgaacaggggcggcgttgctgcacttgtcggctgggtacggcagttttgggatgaacccgacagaattagatgagattgcaggaaaactcggttaacggagtgatcgagttaacattgttaagttaaatattggtttcaactccgatttacatggttgctgtgttgttaaattgtacaaagatgttatagaaacaaaatgtaacatctctatggacacgcacacggataacaactatgaacaaaagtgggaaatacctcgtctggacagtgctctctgtaatgggagcatttgctctgggatacattgctttaaatcgtggggaacagatcaacgcgctgtggattgtggtggcgagcgtctgtatctatctgatcgcttaccgtttttatgggctgtatatcgccaaaaatgtgctggcggttgacccgacgcgtatgacgccagcggtgcgccataacgacgggctggactatgtgccgacggacaagaaagtgctgttcggtcaccattttgcggccattgccggagcaggtccgctggtggggccggtactggcggcgcaaatgggctacctgccggggatgatctggctgctcgctggggtggttctcgccggtgcggtgcaggatttcatggtgctgtttgtttctacgcgccgtgacggtcgcagcctgggtgagctggtcaaagaagagatggggccaaccgccggggtgattgcgctggtggcctgctttatgatcatggtcattatccttgcagtgctggcgatgatcgtggtgaaagccctgactcatagcccgtggggaacatataccgttgcgttcaccattccgctggcgctgtttatggggatctacctgcgctatctgcgtccggggcgtattggcgaagtgagcgtcatcggtctggtattcctgattttcgccattatctctggcggctgggtggcagaaagtccgacctgggcaccgtactttgactttaccggcgtgcagttgacctggatgctggtgggttacggttttgtggcggcggtgctgccggtgtggttactgctggccccgcgtgactacctctctaccttcctgaaaatcgggactatcgtcggtctggcggtaggcattttgattatgcgcccgacgctgaccatgcctgcgctgaccaaatttgtcgatggcactggcccggtatggaccggtaacctgttcccgttcctgtttatcaccatcgcctgtggcgcggtgtctggcttccatgcgctgatctcttctgggaccacgccgaagatgctggcgaacgaagggcaggcgtgctttatcggctacggtgggatgttaatggaatccttcgtggcgattatggcgctggtttccgcctgtatcatcgatccgggcgtgtattttgccatgaacagcccgatggcggtgctggctccggcagggacggcggatgtggtcgcttctgccgcgcaggtggtgagtagctggggctttagcattacaccagatacgctaaaccagattgccagcgaagtgggtgaacagagcatcatttcccgtgcgggcggtgcgccgacgctggcggtggggatggcctacattctgcacggcgcgctgggcggcatgatggatgtggcgttctggtatcacttcgccattttgtttgaagcactgtttattctgacggcggtggatgcaggtacgcgtgctgcgcgctttatgttgcaggatctgctgggcgtggtgtctcctggcctgaagcggaccgatagtctgcctgctaacctgctggcaacagcgctgtgcgtactggcgtggggctacttcctccatcagggcgtggtcgatccgctgggcggcattaacactctgtggccgctgtttggtattgccaaccagatgctggcagggatggcgctgatgctctgtgccgtggtgttgttcaagatgaaacgtcaacgttacgcctgggtggcgctggtaccaacggcctggctgctgatttgtaccctgaccgcaggctggcagaaagcgtttagcccggatgcgaaagtcggcttcctggccattgctaataagttccaggcaatgatcgacagcggcaatattccgagccagtatactgagagtcagctggcgcaactggtgttcaacaaccgtctggatgccgggttaaccatcttctttatggtggtcgtggtggttctggcactgttcagcattaagacggcacttgcggcattgaaagatccgaagccaacggcgaaagaaacgccgtatgaaccaatgccggaaaatgtcgaggagatcgtggcgcaggcaaaaggcgcacactaaagtcagagtgagggggggatgttggcgaatgttggcttagtgcccagggttccctctcaccctaaccctctccccggtggggcgaggggactgaccgagcgcgttgatagcatttgtaggccggataaggcgttcacgccgcatccggcactctttcagcaacatggttagcggaggccaagatgtttgatagtctggcaaaagccggaaaatatttaggtcaggcggcgaagctgatgattggtatgcctgattacgacaactatgtcgaacatatgcgggttaaccatcccgatcaaacgccgatgacctacgaagagtttttccgtgagcggcaggacgcgcgctacggtggaaaaggcggcgcgcgctgctgctaaatttgtacgtcaggctttaaagctttccacttttttgaacgctgcacgcaacgtatctggtgtcagcgtgactggcaggtaatgaatggactccaccggacgcagggtgtgggcaatcactttgtcgatctccgcctgattattgatatccacttccagctccgccagtgtagtcggcagatgaaaacgctgatacgctccagttaattgcgccagcacatcatcctgacccagcaaggcgctttgcaccagaattccgtaggcgactttggtgccgtggagaaacttctcggtttgcggcagcacggtcagaccgttatgcacggcatgagctgccgccacacgcgtaaaacgatcgcccagaccaccaaccatcccaccaccagcaataatagcatccaccacatcgcaaaaactttgcgttaactgttgattttgctgatcgctcagcgcctgttcgctactgtttaacaagacgtcgcgaatggcttgcgcattattgatccccagtcgcacggttagcggcaacgtttctggttgcggagccagcaccaccgcttcataccatttcgccagcgtgtcaccgatccccgccagcagatattgttgcggtgcattgaggataatctccggttccaccagcaccataaaattggcgtcgtcgaaaatctcataatgcagcgcctgtccggcatcattataccagacggagagcggtgtccaggcggcgcaggtggcggcgatcgtcggaacggcaacaaacggcagaccgagacggcgggcgagggctttcgcggtgtcgagcagtgcaccgccaccgacgccaatcaccacgctgcggtcgtcaccggactcagccgccagttgttgtacatcgctttcgctgcaatgaccgcgaaacaaaatatgctttgcccctggcagtccaaacgctggcggaagtttggtttgcgccgcagcaatggcgcgtttgccgtagatccacaccgcgcgagaaagttgttcatcagtgaaaaaatcgtgcaggtgattgaaacttcctggatgactaaagtagttagccgggccgacgaccacgcggataggattgtgaggcatgttgtgttgtccttattgttttatttagacatctaaacgtcttgattgccaaatactagcatcgtgttatagtgccttcaacacgcaacttcgtcaggtacaataaaaatgacaaataaccctctgattccacaaagcaaacttccacaacttggcaccactattttcacccagatgagcgcgctggcgcagcaacaccaggcgattaacctgagccaaggctttcctgattttgatggtccgcgctatttacaggagcggctggcgcaccacgttgcacagggggcaaaccaatacgcgcccatgaccggcgtgcaggccttgcgcgaggcgattgctcagaaaacggaacgtttgtatggctatcaaccagatgccgatagcgatatcaccgtaacggcaggggcgacggaagcgttatacgcggcgattaccgcactggtgcgcaatggcgatgaagtgatttgttttgatcccagctatgacagttacgcccccgccatcgcgctttctgggggaatagtgaagcgtatggcactgcaaccaccgcattttcgcgttgactggcaggaatttgccgcattattaagcgagcgcaccagactggtgatcctcaacactccgcataaccccagtgcaactgtctggcagcaggctgatttcgccgctttgtggcaggcgatcgccgggcacgagatttttgtcattagcgatgaagtctacgagcacatcaactttagtcaacagggccatgccagtgtgctggcgcatccgcagctgcgtgagcgggcagtggcggtttctagttttggcaagacctatcatatgaccggctggaaagtgggttattgtgttgcgccagcgcccatcagcgccgaaattcgcaaggtacatcagtatctgacctttagcgtgaataccccggcacagctggcgcttgctgatatgctacgtgcagaacctgagcattatcttgcgttaccggacttttatcgccagaagcgcgatattctggtgaatgctttaaatgaaagccggctggagattttaccgtgtgaaggtacatactttttgctggtggattacagcgcggtttctaccctggatgatgttgagttttgccagtggctgacgcaggagcacggcgtagcggcgattccgctgagcgtgttttgcgccgatcccttcccacataaactgattcgtctctgttttgccaagaaggaaagcacgttgctggcagcagctgaacgcctgcgccagctttaattatttaaccgtccaggcgcgggaatattgacggtcggcaaacaactcttgcaggccgttaatttgcttcaggcgcagcacttcgtcgctgtccattcccagctctttgccaattttattatcgtcccatcccaactggctaagttcacggacgatttcgctcatggcggtgatttgatggcgtccacgagcgcgattatgacgaatagtcgcggcgatgcgttgattacgcgtaccttccagacaggtcaccggcaaataaccttttaagcgtaattttaaactactactgcctttaccaatttcatggcggtgaaaaccatccacgatttccatggcatttttatccgtatgtgtgaccacaatgggttgggtaaaaccatctatttcaatggatttttgcagcagttttttttcgggtggtgccacgttgtttgggttgtaatcattaggcataagttggctgtttttaacccacagaacgcaatccactggctcttcacgaaaggggctaacctgatggatcgccatgcggatttcattaatcgctttgatgcgatcatcttccggcaagctggcgagaaattgcgttaaatcctgcgttaatcgttgttgcatagtatcccccattcctgacgttttccttttatccgttcgttataacgctgatagttcttgctttttgtggggctaaaacttaatgcccgacaccagtaatcgttattgagtaaaactttgcatatccgccgccaggaggggatatctttcgcgccaatgtccccttgctgggtttgtggaacctcgatgccttttttctgataccagtgcaaataaatggcgattttattgcggtaatgctcagctgttttttccggcatgctattgagcagcaataatgcatattcttgccagtctaaatgttctggcttgaggattttccgatgcccatagaaatgattgtcatgtccggcgtaaatgccgccactttttaccccgctgactcgtgcgcacatagcagcccagcgatccggttcgataacgtgatagagccataatccttgtcgttgctccgggccaaaaggttcgcaaattcgcatatgacgcagaggaacgcctgcctgatacattaggttatacagtgggttgcagagactttgatgatttgcataccaggtccagatatcagccactttccagtcgtaaatggggtaaatgtaccagctatgaccgcctggtgcggccgtagtccagggtttatcgtcggcaaaacgttgtttatttaaactggcgatggcgacaaaacggttgtaggactcatccgcacggatgccgatcatcatcgccgccggacgtttttgactaaaccattcggcaaactcacgtacaaattgttcgaaggtcatgcctggctggtaaaagcagaaaaagtcagggtcggttatcgcatcttggggaggttgacgtacccattcgacatcaggttcccagcactgccattcgggttggtattgactaagggaattttgcgtcgtaagcgggagcgcaacccagtaaaactcttcgatgacatcggtgtacaactcgcgcagggactgaacatagttaatggtgcaagagaattgcgcctcccagtcgataaacaaaacgcagatttttttgcccatttgtcgggcaagttcggctgtcagatgcagcattaaaccagagtctttgccgccagaaaaactgacacaaacgcggggtagggtgttgagtgtccaggtaatacgctctcgtgcagcttccagaatattgagcggaagaggaattttataaatagacatctgaagacgctctctgaacgttacagggtgatcagtgagataagtctgttaattataaagtaaacactgtaaagcagagtgttttatttttcattcgcgctgtgaataaatagatgaaagttatagtagctgtctgtagttatatatcaaaaactctcatttagacggtcaataaatcgggagaacaccaaattatttaaagaagatttattataggaaatgtaaagctttatactaggtaacggatgttctagttttatctcttttaagttaagaaagtcacggtaggaattataaagttcataggggactattcccagtaaatctgtaactgcaatgctattaatgattgtcagcaaagaggaaccacgaaaactgattttgcgattcataaatctctcgtctatttccatttgaatatcatcaacccctgcacttttagatattaattgggtgaactcttctgccataatttgttcataagtgctattgtcagtaattcgtggatgcctattactacaaattagagtattgcgaatcgtatgcaatggcatgcaaatgacggaacggctgatcactggcatttgggtgatcaccagatcggctttgcggtgaaccaacagttcttcagcattctctgcactcatgaggatatcatggcactcaatctcgacagaggaatcttgccgtaggcagcggatcagcatactattattagagcaagaaatgagctgagggccgtagataataaagtttttctttagttcggacttattgactatattaattgtttgttcaaggcctctgagatttttctcaagatggtgatgcagatttaaccctgttgtcgtcggcgcgataccttttccactgcgaatgaataaagggtcattaaattgcgcacgtaagcgttgtaagctctggctcacggcacttggggtgatatatagactttcagcagctttgctaatgcttaaatgctggtaaatacactcaaatatgacaagaagatttaagtcgaactttttcaagtcgtagagattggccatacactactccggttatatttttcttccatgatatattcacttaatcaatgttttttgcgtatatatttttattgattatgtttttttgcttaactcaggattaagtttttctaaaatagcacagccacttagggcagagcgagcaattcatgcttttttaggatggttgaaaagcagggatatagttcaaccatccatgaattaccttttatttattccccataatgatattaagcgttttctgatcgggcaaccccacggcctgttgtagcgtattttccttactcatgtaatagatagccggcgtgacatttgcccccagatcgtccatcagtttctcattgtcacttaacactttcatttgctctgtacttacgtttgcaggcacgtttagcttaagcttgccaccagaggcttcatattgttgccaggtttttgcgggatctttggaggcaagaattgccgctgctgtcgccgggctttctggcttgataaccccaaccaacaatgttcttaattgcactttgccagaatctacccacgggcgcgcctgctgccagaactgtttacaatatgggcagaacggatcggcgaagacgtagacaatgaccggcgcatcttttttaccgtcgaggagccagtgggattgttccatccgttgccacatttcgcgtccggctggtgcgtaaatttctttttcgataagtgtgttactcaggttttcacctttctcgttgtacatgtaaccagagatagcgtgcttaccatctggagtcaggtagatggtgacgcccatatcctgacactttccgagataacctttcattcctccgggggcatcgaatgttttgatgattgtaatgccctgtttttcaatcgcttttactggagcaggaagttcctctgcgaaggcgattgcaggaagcagagccagtaaaagtatcttttttaacattaatttgtccttttcagtcagtgcaaaagtcgagtaaaaggcataacctatcactgtcataggtaagagcttagatcaggtgattgccctttgtttatgagggtgttgtaatccatgtcgttgttgcatttgtaagggcaacacctcagcctgcaggcaggcactgaagataccaaagggtagttcagattacacggtcacctggaaagggggccattttactttttatcgccgctggcggtgcaaagttcacaaagttgtcttacgaaggttgtaaggtaaaacttatcgatttgataatggaaacgcattagccgaatcggcaaaaattggttaccttacatctcatcgaaaacacggaggaagtatagatgtccttgattaacaccaaaattaaaccttttaaaaaccaggcattcaaaaacggcgaattcatcgaaatcaccgaaaaagataccgaaggccgctggagcgtcttcttcttctacccggctgactttactttcgtatgcccgaccgaactgggtgacgttgctgaccactacgaagaactgcagaaactgggcgtagacgtatacgcagtatctaccgatactcacttcacccacaaagcatggcacagcagctctgaaaccatcgctaaaatcaaatatgcgatgatcggcgacccgactggcgccctgacccgtaacttcgacaacatgcgtgaagatgaaggtctggctgaccgtgcgaccttcgttgttgacccgcagggtatcatccaggcaatcgaagttaccgctgaaggcattggccgtgacgcgtctgacctgctgcgtaaaatcaaagcagcacagtacgtagcttctcacccaggtgaagtttgcccggctaaatggaaagaaggtgaagcaactctggctccgtctctggacctggttggtaaaatctaaatttccttcgtctttcacgccatagcggcgttggcgtcgcccgctcaccccggtcacttacttgtgtaagctcccggggattcacaggctagccgccttgctctgacgcgaaatacttcggaaattcacctaattcttcgggtgctgcggcacccgattttcttccccgcaccatgatgcaagctgcatccaggtagccgcagaggccgcttgcatgatgatgtttaaagcccaggagataaacatgctcgacacaaatatgaaaactcaactcaaggcttaccttgagaaattgaccaagcctgttgagttaattgccacgctggatgacagcgctaaaagcgcagaaatcaaggaactgttggctgaaatcgcagaactgagtgacaaagtcacctttaaagaagataacagcttgccggtgcgtaagccgtctttcctgatcaccaacccaggttccaaccaggggccacgttttgcaggctccccgctgggccacgagttcaccagcctggtactggcgttgctgtggaccggtggtcatccgagcaaagaagcgcagtctctgctggagcagattcgccatattgacggtgattttgaattcgaaacctattacagcctctcttgccacaactgcccggacgtggtgcaggcgctgaacctgatgagcgtactgaacccgcgcatcaagcacactgcaattgacggcggcaccttccagaacgaaatcaccgatcgcaacgtgatgggcgttccggcagtgttcgtaaacgggaaagagtttggtcagggccgcatgacgttgactgaaatcgttgccaaaattgatactggcgcggaaaaacgtgcggcagaagagctgaacaagcgtgatgcttatgacgtattaatcgtcggttccggcccggcgggtgcagcggcagcaatttactccgcacgtaaaggcatccgtaccggtctgatgggcgaacgttttggtggtcagatcctcgataccgttgatatcgaaaactacatttctgtaccgaagactgaagggcagaagctggcaggcgcactgaaagttcacgttgatgaatacgacgttgatgtgatcgacagccagagcgccagcaaactgatcccagcagcagttgaaggtggtctgcatcagattgaaacagcttctggcgcggtactgaaagcacgcagcattatcgtggcgaccggtgcaaaatggcgcaacatgaacgttccgggcgaagatcagtatcgcaccaaaggcgtgacctactgcccgcactgcgacggcccgctgtttaaaggtaaacgcgtagcggttatcggcggcggtaactccggcgtggaagcggcaattgacctggcgggtatcgttgagcacgtaacgctgctggaatttgcgccagaaatgaaagccgaccaggttctgcaggacaaactgcgcagcctgaaaaacgtcgacattattctgaatgcgcaaaccacggaagtgaaaggcgacggcagcaaagtcgttggtctggaatatcgagatcgtgtcagcggcgatattcacaacatcgaactggccggtattttcgtccagattggtctgctgccgaacaccaactggctcgaaggcgcagtcgaacgtaaccgcatgggcgagattatcattgatgcgaaatgcgaaaccaacgtgaaaggcgtgttcgcagcgggtgactgtacgacggttccgtacaagcagatcatcatcgccactggcgaaggtgccaaagcctctctgagtgcttttgactacctgattcgcaccaaaactgcataagaagaagtaagattcacctgcaattgcttagccgccggggtcaaacctggcggcttttttatggcattaaaaagccccgccgggatggctccgggcagggcgggatacttattctggcaattaacgcacaaccagcaccggcagattggcgtggcggatcacgctgctggcgttagaacctaacagatgggtgctaatgcttgggttgcgagaaccaataactacaacatcagcccccagttcttctgccaactcattgacttcatcccgcacgctaccaaaacggacatgttgtttaatgcgggaaggatcgatggtgaagtggctgaccatcgtttgcagacgttcttgtgcttcatgttgcagatgctcttcaaaacgacgcacatcagcggcaaaacggtgcaggctcaggctggcactcccgggtagtacgtgaagtagatgaataactccgtcatcctgggcgaggaattcagcgtggcgaacagctttgtcgctcaattccatttcaaatacatcaactggcataatgattgtcttatacataaccctttctccctgttaatcatgaacaaatcattcgccatgattataatatttatccctgatatttgtctggttctttttccttacgaactgtttctgtgatgaatatattctcactgaacaccaggaattctcccaaaacctgtggtaccgcccgttttcccgctgtgatagctacccttaaagactgactcttttttgaactgtctctggaggttgcatgaaagcattgacttatcacggcccacatcacgttcaggtagaaaatgttcccgatccgggcgttgaacaggcagatgatattattctgcgtattacggcaacggcgatctgtggctctgacctccatctttatcgaggcaaaatacctcaggttaaacatggcgatatttttggtcatgaatttatgggggaagtagttgaaaccggaaaggacgtaaaaaatttgcaaaaaggcgaccgagtggtaattccgttcgtcattgcttgtggcgactgttttttctgtcgattgcaacaatatgccgcctgcgaaaataccaatgcgggtaaaggcgctgcgctcaataaaaaacagataccagctccagcggcattgtttggttatagtcacctgtatggcggcgttcctggtgggcaggcggaatatgtccgcgtccctaaagggaatgtggggccgtttaaagtaccgcctttgcttagtgatgataaagcgcttttcctttctgatattctgccaacggcatggcaggcagcaaaaaatgcgcagatccaacaaggtagtagcgttgcagtctatggtgctggtcctgtgggattgttgacaatcgcctgtgcacggttgctcggtgcggaacagatttttgttgttgatcatcatccctaccgcttgcatttcgccgccgaccgctacggcgcgatcccgattaattttgatgaagacagcgatccggcacagagtattattgaacaaacggcaggtcaccggggcgtggatgcagtaatagacgccgtcggttttgaagcgaaaggcagcaccacggaaacggtgctgactaacctgaaactggagggcagcagcggtaaagcgttgcgtcagtgtattgcggcggtcaggcgtggcggcattgttagcgtaccgggcgtctacgctggatttattcacggtttcctgtttggcgacgcctttgataaagggttgagctttaaaatgggacagacccacgttcacgcatggctgggagaattattaccgttaattgagaaaggattactgaaaccagaagaaattgttacccactatatgccgtttgaagaggccgcccggggatatgagattttcgaaaaacgtgaagaggagtgccgtaaggtgattctggtacccggtgcacaaagcgcagaggcggcgcagaaggcggttagtggtctggtgaatgcgatgccggggggaacaatatgatcgtcaggagtggttttcgaggtaaaggacagccatgacgataatcgccgccataatcagaaatcctatcaggatgtaaaatgcttctgccatggttattcccacaaacgaaacggaataattttgcagcaaaagtgaacagtgagaaccaggaaaaattgctgattttgcgtaaagaggatgcgagtgcatcctctgggcaaagcgagttatcgcttgtgcagatgggattaaagcaggtagtcgccagcagcttctggctggtattcgagttccagcacttcaaggtgggttgcaacgccgcccggaagttcccagtgaatggaatcgccaacgcgcagccccagcagtgcggcacctaccggagccataacggaaagctgagtattgctatcggtcatttttgccggatacaccagcgtgcgcacacgcacttcgccatcgctaagattgcggaatttaacccggctgttcattgtcaccacgtcgtgtggcatctcttctgggctacacatttgggcgcgatccaactctgcgtttaacgcgtcggcgattggcaaaccagcataggcgggttgctccagcagaatatcgatgcgttcggcatccaggtcgttaatgatgatagttggtctggacatttttactccatgtcgtcggtgctgcgagtgtcgcagataaacatacccaaaagaaaaccctcaccgtcaggcggcgagggtttaactcacatgatgatactgactgttgctcactctttgaagtgatttgcgtcacattcagggaattcctcaatgcagcgcattatgtataaatcttaatcgccttggtttatggaagacgaattagcgtgttttgtaaatcagatgattaataacccgctttatcaatcacaaaggttttgccacagttacctgggtgaggttgtggcaagaaactgtttgcagaaagcggagcgttgatggcgtcagctttgatgctgatctgaatttcagtcaaatacgcagggttaccctggcacgttagcttaactgctttcacgttctcttttccccagcttttggcaaaggcggcgtcaaagtcacggcggctcactgttttaccgtaattatccgcaaggaattttccggcttcgctctctttaatttcttgattcaggcgtaccatcgtaccgaagtatgcgtccggatcaaaaccaaagcaggcaccgtgtttggcatattcgtagcgttccaggcaggaacgtccgccagctcctggcatgacttcacttagtttagcggccgtttccagacttaatccggtttccgggctactacacattcggctggcgcgcgcttctggtagattcgggattgggcgagtagcgcaaccgaagcgcatccagcggcgttcatcaacaccacgggcagcaacgcttttaggcaatcctggccacagaccatgtacggtcagaaaatcagctttgttggtcgtttcggtttgcaggcgacattcatctcgttcgttacgatttcgatcgtgttgactctggcaaaatccggtttgccaggagagggccaggacatagcgatcaaaatcgccatactgttttgcctgcaacgctaaggcgttggcagaagagaagggaagcagagaaaccgcgagcaacgcggcgttacgccagaatgctttcataatgggtgtggaactcatacatacactgaatactatctattaaatcataaaaaagcccgccaggtgggcttacctggcgggcgtgatgatttattcagcgtttggcgaacgtattagttccacatggcgagaatcggccagccaaccaacagcaacatagagatgtaaatcaccccgaagattgcgccaagacgccagtaatctttacttttcacatagccacagccgtaaataatcaccccaggaccggttgcatacggcgtcagacagcccatgataccgatagacagcaccagcaggatacacagttgttccattggtacgcccggaatacctttaccgacggccagaataaccggcagcatggttgcggtgtgcgcagacaggctggcaaacaggtagtgtgcaaagtagaacaccagaaccagtacaatcaccgttgcgtttggactgaatccttccaggtgcgtactcatggtaccggcgaaccagtcaataaaaccagaacgagtcaggccgttagccatcacaaccagagttgccaggttgaccagtgtgttccatgcgctgttatagcgggtaatgtctttccaaggcacaacgtgcagggccagcattaggctaactgccagcagaccaaccgcagtagcattaatgacttcactgccaaatacccacaaacctaagctgagcaatacaaggccaatcagtgtccactctctgcgtgtcagcgcacccatggttttcagttcatcacccgcccaggttgccacttcttcactgtgtgtgatttccggtttgtacagcacgtaggaaagccacggcgcaatgataagcaagataaccccaaccggcaggaagcagaggaaccactgcaaccagctaatctggataccggcaattttgctgacgaactccagacccagcacgtttggtgccgcaccggtgacaaacatggagctactcagactggtactaatgaccatcatccacatcaaatagccgccaatacgacgcgcggacggatcgttcgggaaacttttaaacaacggcggcaggtttttaatgaccggaaaaaccgtacccccggtacgcgcggtgttggaaggtgtaaacggtgccagcagaatgtcgataatgacaatcgcataacccaacgtcagcgtgcgtttgcccatgaatttcaccaggaaaagggcaatgcgacgacctaacccggaaacttcataccctaatgcaaaaataaatgcgccaaataccagccataccgtggtgctggaaaaaccagccaggccccatttcagcgcctgtttttgcgcattaaacgctgggtcagctaattctttggcatcaaagagcaggtaattactgccaataacgcaaatagtaaccgcaataaaactgatcgctgttgccggaattggctcgaggatcatgccgacaatcattgccacaaacacagcgaagtaatgccatgcctgcggcggcataccgtcggggacagggataagaaacatgacacccatcaccaccagtggggccaatagtttccatatattatcttttgctaaagacatacgggttctccgaaaattaatatttccaaatttatcaagtgcttaaataattaaatctgtgctaaaaaccaggtaaggatcagtaggtcagcactgccgcctggactgagatttcgttcgatacactccctgtcgaactgccggagataatcgagatcggcgggggttcgaatgccccctttttgcaataatgtttgcgcctcgcgctgtagccagcgcaggcccccctcgccaccgcggcttgcaacgttggtatcgccgttgatcgccatcagtaggagcaaggtatcgagcaatgccagttcaggatctaacccctgatccagcagagtgaggtaatgcggcaaggcgtgattgatcaccagtggataacccgcttcggcttcaccgcgtgcgccggtaaggccaagctgttggtacaaccgttgacctgccgtcagttgactattattggtacgcagttcgcgatcggtcaggccacggcagaaacttgccgccgtagaacaaacggttgttggcgttaccggttggttgagttgaagcaaacggccaattgccgcacatagcagccctaaagaaaaaatgctgcctttatgcgtgtttacgcccgcagtggcgcggaacatatcaccttcgcaagccataccaattgggcgtaatccgtggagtaccgcttctggtgccatttccgcactacaggcaccaaattcaatgaaacggggtagccagccctgaatcgccagcgcgctgcggtggaaatcttccagcgccatatctttgtgcgcaccgcagttaatgcgatccacgaggcctggtttcggactcagattgacttcagtcagcatggcgcgccagcccagcagggcgtactcatcgattaaactcgtcgcaagctttgtggttttagtactcgttgcaggcatgctcatcgttcagcagtgcctccatgttatttagttgacgttgcaggcatcgacatcgttcagcagtgcctccatgcggttgagtaaatcggtcagttgatgggtttttccacgcgcgcagacggctgcgctttgttcgcacaacaggcagcggcgaggcggcagactatagtcgcggcgggagagaatttcgccttcgggcgtcaggacatcgatatcccataaccgcccgagaggatgactatgttcaagctcaatggtggcgagcttgaggtcgcgagccggggcggcaatgctcaacatgccctccggcccgctggcggaaaccagtgcagcctgctcctgaatttgccagccctgttttgcggctaaggcacgcaaggctgtcacgccatgattaaaaattcggcgtgtgacctcgctgtctttaatcggcccaggcgcaaccacggtaaaggagaccagtggaacaggatggcgcttgagccagacgtgttgccgtgcttgcctttcatcccggctgacgagcagctcgggaatacttaccgcatggtggctggcgagttcaggaagcaggtgcatggcttattccttcacctgatgcacaacatcgatcacgctgccatcgcggtaacgcacaacggcaacgacgcggtctgtgaattcaatcggctgtggttcaccggtcagcagacgcgcacgttcgcgcagccactcaatggaaaccactttaatgcccgcttcctgcagacgttctgccagttccggacgtgccgggttaactgcgataccgtggtctgtgaccagaatatcgacactggagcctggggtgatgcaggtcagtacgttatccaccagagtcggaatacgaccgcgtaccagcggcgcgacgatgatggaaagcgcagaggcaatcgcggtatcgcagtgaccaccggaagcaccacgcagtacgccgtcagagccggtcagcacgttaacgttgaactgggtgtcaatttccagcgcgctcagtaccaccacgtcgagacgatcaacgcttgcgcctttgctaccccagttagcgtactggttggcgctgatttcgatgtgattggggttacgggccaggctttgcgcagcatggctgtcaaagctctgcacatccagcagtttgcggatcagacctttttcgtgcaggtcaaccatcgtcgcggtaataccgccaagggcgaagtcggcgcgaatatcgcggctacgcattttgtcttccaggaaacgggttaccgccaggcttgcgccgccggtgccggtttgcatggagaaaccttctttgaagtagccagagttgacaatcacatccgcagcgctacgggcaataagcagttcgcgcgggttagtggtcatacgggtcgcgccagcgccgatttttgcagcatcgccaacgcggtcaactttgacgatcaaatcaacctgatcttgctcaatgcttgccggattatgcggataaggcagcagttcttcggtaagcatcacgacctgttttgcgttgtcggcatcaactattgcatagccgagggagccgcagcaggctttaccggtgtagccgttggcattaccgaattcatcacaggacgggacgccgaggaaagccacgtcgatattcagttcgccgctctgtaccagatgcacacgaccgccgtgagagtggatctgcaccggttctgccagcagaccacgggagatctcttccgccagtggaccacgcaggccggaggtataaatgcgggtaaccacgccctggcgaatgtgttctaccagcggcgcatggcaatcactcagggagctggacgccagggtcaggtttttaaagcccatcttcgcgatgacgtccatcaccatattgacggtcaggtcaccgccacggaaagcgtgatggaaggaaaccgtcatgccgtcctgtaaaccagagcgacgaatcgcttcttccaggttggcgcacagtttgcgatcgcgcgctttttcagcctggtaggtttgctttgggctgttctggaaagcggcaagatcgcattcagcgcgacgattccaggccgctacccgttcttgtcgttgagattgttcaattttctgcgtcattttgattgccttattcttcgcggatgccggaaagttctgcacgggagagcaccagacgggcgcgatcgataaccggaccgtccaccatcttgccgttcagggaaaccacgccgaggccttcgcgagcggcggcttcagcggcttctacgacgcggcgggcgtgatccacttctttctgggtcggtgcgtagaggttgtgcagcagatcaatctgacgcgggttgatcaggcttttgccgtcaaagcccagctgtttgatgtgggcggcttcttgcagaaatccggcttcgttgttagcgtcggaatagacggtatcgaacgcctgaatacccgcagagcgcgcggcctgcaaaatggaacagcgtgcgaacagcagttcagttccttccggggagcgttctgtacgcaggttgcgcacatagtcttctgcaccgagggcgataccgatcaaacgctcggaagcgtgagcgatttccactgcgcgggtaatccccagcggagattcaatcgccgccagcaggccggtgctgccgggttcacgaccacaggctttttcgatacgcaggatctctttttcaatatccagaacatcctgagcggtatcggttttcggcagacgcacaacgtccgcaccaccgcgaacgacggcttccaggtcgttaacaccccattcggaatccagcgcgttgacacgcacaatggtttcaatatcgcgatacagcggatgttgcagcgcgtggtaaaccatgcggcgggcggtgtctttttcacgcaatgctacggagtcttcgaggtcaaacatcagggcatcagccgggtagatgaaggagttgctgaccatcgcggcattggcaccaggcacaaacaacatgctgcggcgggtgcgagttttacgttgttgcaggctagcggaaatcattggcaatcctcccatggcagagccgggataccgctggcgcgtgccagcagggcttccagtcgtgcacgtaaaatgcagtacagtgcgcctttgtcatcgacattcagctgtacgccgcgcacgttgtagcgggcgagaacgtccagaatggtggtgcgaattgcatcgccaaactgtttctcaacgctgctattgatttgcaggtcgatatcctgcgtatcgagtggggcgatgcgtatcatcacatccccagactcaagggtgcctgcaacggcgggctggtttattttcatttttcacctgtttctcatgcgggggtcttttgacgagctgccgcgtcctggcgggagtgctcaagcaggttctgcaaataatgcagcgtgactgcagggaccagcggcgcgatagccgtgagatcgtttttcgccagcagttgacgtacccgggaagcggatatcggcatctcctggtaacgcagccgctcaatttcaaccagttcgatgggcggtgcggagatagtcggcgtttccagccagtagcgcatatcctggttgtactgggcggtaacgcgacaaaagggttcagtaccgacaaagcggtgagttacacccagcgcgggagcgaggtactgacggaaaatcttcagatcaatttcggtgtaacaatggttaatgacgctctgttctttaatgaagtagcaagggaacgtagcgcgggagatgatgtattcggagccacgatgcacagtcaggcgtggaatatcggcggtgccttttaacaccaaatccagccggtcttcataggggaagcgactagaatcttctttgactaaaaacagatgcaaccagtcgcactgtgccgcagcctgttgaatcagataacggtgaccattcgtaaagggattggcgttcatcacaatgcagccaatcttgttccctggatgacgaaattttttcaggctttcggcatagcgtttcagtcgcgtggcgctgttttccatcagcaccatcacgccgggtacgctggtcagcgtggaaaaaccgcactggcggaacagcgcctcgtattcggttttggtataaataaacagatgcgtgctgtgccgctcataggcgaggtttatcaattcagtggctaatgtcagcgccagtccttcaccgcggacggattcactgatagcaacgcatttaataatatttccggcaattccaccgcacgcgataagcttttcatcgcgggttacggtaataaatacttcgactgtggtgtcaacgctcaaatcattttcatgcaggaattgggcgatttccgccatttttttattttcactacgttttacgcgggtgaaaatatcattgccgaacataataaatagtatcctgaaggtgcatgttgttatcgatttgcaacgaatgttgttcaatgttgcaaactgataaccttttattttcacttgggagaaagggggtgatcgaggtatatctttttctcctttcgctatacatcctaaggagtatttcggcgtgaaattttgatttatttcacatagagttagtggttttttatttatttaatgattttaagttttttaattaatgtaattacgaaatgactcgcaggtttaagtgatttaattgatttaatgaataaaatttgccacgatcataattaatatctatgtattttgattcaacattttaattacatccgtcaaagaggctcgggacaacccgcaaggaaaacaatgttgcagcttaacgagaataaacagtttgcatttttccaaagactggcatttccgctgcgtatctttttgctgattctggtgttcagtatatttgtcattgcagccctggcgcaatattttacggccagttttgaggactatttaacgcttcatgtacgcgacatggcaatgaatcaggcgaaaattattgcctccaatgacagtgtcatctctgcggtgaaaacgcgtgactacaaacggctggcgaccatcgctaacaaattacaaagagataccgattttgattatgtggtgattggggaccggcacagcatccgcctttaccatcctaatccggagaaaattggttatcctatgcagttcaccaaacagggcgcgctggagaaaggggagagctacttcattaccgggaaagggagtatggggatggcgatgcgcgccaaaacgccaatctttgatgacgatggaaaagtcatcggcgtggtgagcattggctacctggtgagtaaaatcgatagctggcgggctgagtttttattaccgatggcaggtgtgtttgtcgtgctgttagggattctgatgttgctgagctggttcctggccgcgcatatccgtcggcagatgatgggcatggagccaaagcaaatcgcacgcgtggtccgtcagcaagaggcgctgtttagtagcgtttatgaagggctgattgcggtggatccgcatggttacattaccgccatcaatcgtaacgcaagaaagatgctggggctgagttcccccggacggcaatggttgggtaaacccattgttgaagtggtcaggcccgccgatttctttaccgaacagattgatgaaaaacgtcaggatgtggtggcgaactttaacggtctgagcgttattgccaaccgggaagctattcgtagtggtgatgatttgctgggggccattatcagctttcgtagtaaagacgaaatttccaccctcaatgcgcaactgacgcaaataaaacaatacgttgagagccttcgtacattgcgacacgagcatctcaattggatgagcacgctcaatggtctgttgcagatgaaagagtatgatcgcgtgctggcgatggtgcagggggagtctcaggcccagcaacagcttattgacagcctgcgcgaggcgtttgccgatcgccaggtggcggggctgctttttggtaaagtgcagcgcgcccgggaactggggctaaaaatgatcattgtccccggtagccagcttagccaactgccgccaggactggatagcaccgagtttgcagccattgtgggcaatttacttgataacgccttcgaagccagcctgcgtagcgatgaaggaaacaagatcgttgaattattcctcagcgatgaaggcgatgatgtggtgattgaagtcgccgatcagggctgcggcgttccagagtctctacgagacaaaatatttgagcagggggtcagtacgcgtgctgacgagcccggtgaacatggcattgggttgtacttgattgccagctacgtaacgcgctgcggtggtgttatcactctcgaagataatgatccctgcggtaccttatttagtatctatattccgaaagtgaaacctaatgacagctccattaaccctattgatcgttgaggacgaaacgccgctggcagagatgcatgcggaatatattcgtcacattcccggattcagtcagatattactggcgggaaatctggcgcaggcccgaatgatgatcgagcgttttaagccggggctaatcttgctcgataactatcttcctgacggtagagggattaatttactgcatgaactggtgcaggcgcattatcccggcgacgtggtgtttaccactgcagccagcgatatggaaacggtgtctgaagccgtacgttgtggtgtatttgattatctcattaagcccattgcctatgaacggctggggcaaacgctaacccgtttccgccagcgtaaacatatgctggaaagtattgatagcgccagccagaagcaaattgatgagatgtttaatgcttatgctcgcggtgaacctaaggacgagctaccgaccggcattgaccccttgacgctaaacgcggtgcgaaaactgtttaaagagcctggtgtgcaacatacggcagaaacggtggcgcaggcactgaccatcagccgcaccactgccaggcgttatcttgaatattgcgccagccgccatctgattattgctgaaattgttcacggcaaagttggcagaccacaacgcatataccacagtgggtgacatgataaagccggaggaaacttgcctccggcattactatttacttgcctgtgaccgctgctgccgttcctggcaccatcagctctgtagcaacgataacaatcaccaaaccaacaagcaccggtacgctggtgcgttttacgacttcaaacgggctgatcttcgccatcccggcaaccgcaacgactacgccagaaacggggctaagggtacggccaaggttactcgcctgcagcatcgggatagtcaaatacgccgggttaatgccggaagagtgcgccagtttcgggatcatctcaacaaacgcataaaacggcgcattgccactaccggtcgtgactgccgccagcattgtcagaatcaccaataccagcatcaggatgatactcgcgctaccaaagctggtagcgatagaaatcagactttgaataaagccgatggtgctaagcccctgagcgaataccccagcggcaaccagcagcatcaccacgttagcaaacgcatctgccatcccgcgataagccacttccagaccagagaaaactttctgggtattaaagctgcggaggaactccagaatggaggcaatcagcatacaaatcaccagaatagtgatgatgtgtaattgcggaccccatttaccgtcaaaaatcagtacaccgatgatcggcgtgaacggcaaaatggcataaaacgcaggagcagtggtggtgatttcactgacatctaacatttcatgagagatgtgctcttttttatccagataacgttgccagaagaagtgggcgatcgccatgccgataattgcagcaatactgataggcagcgtcgttttgaaggcgaagtcaatcaggctcatttcggaagcttgcgccgccagcaccacatccccactagtcggtgcgagaataatcgccgccggggaggcacaaatggcagcagctgcgccacgactgataccaacgtttaccatcaccggaaatagggttgccatcagcaaaacacccagaccggttgcggaagagacggccagagacatcagacaggcgacaaaataggcggcaatcatcagcaggtaaggggagttaatatactgcaatggtttactcgccagcttgaccaccatatcattcgcgccgatatgggtcatgtaagcggcaaatccacacagcatcataatcatcatgccgaggtcgccgccgcggctcattagtaatattttaacgtattcaacgatatccgtggcgctgtagcctgtactagcctggctggacggtaacactttgtgccccataatggcactgataatcagcaataacaggccaccgacaaataacacaccagtggcggaataccctttaatgatgtagcgagctacacccacaataaccacaaccccaataaggagctcaatgaatgtcagcataatttttcctgtctccaggccccaaagtaaataataaaaaattcctaaagcttaaggaaaaaatatgcccaataaattggcgatgaatgctgattaaaatcaagaaaaactgccattaagacattgaagttgctgtttttatacatagataacaaaacgcatatttagcggttggcaattatcacataataatgtgtgcaaattgatggtggattgatgcaaatttgttaattgcaatggtgttagctgcggctgtgcgctcaaaaaataatctaatatgagcataggttgacgatatatattatatacttcgttaagatgattgttgtatctcgttaaaaaataaaataatttttccttgattgcattttgtcatcaaaaaagacttggtttttcttttttgactattcccatcgcagaaaacgacgcatcatctttaatcgatgcgcggaaatatttaacttgaacaagcggaaataaatagagcagctattcagattattctttatgttgggtctattaaggttatgttaattgtagctttgctatgctagtagtagatttttgataaatgttttatggtcacaaatgaacgtgagtaaatatgtcgctatcttttcctttgtttttattcagttaatcagcgttggtaaagtttttgctaacgcagatgagtggatgacaacgtttagagaaaatattgcacaaacctggcaacagcctgaacattatgatttatatattcctgccatcacctggcatgcacgtttcgcttacgacaaagaaaaaaccgatcgctataacgagcgaccgtggggtggcggttttggcctgagccgttgggatgaaaaaggaaactggcatggcctgtatgccatggcatttaaggacagctggaacaaatgggaaccgattgccggatacggatgggaaagtacctggcgaccgctggcggatgaaaattttcatttaggtctgggattcaccgctggcgtaacggcacgcgataactggaattacatccctctcccggttctactgccattggcctccgtgggttatggcccagtgacttttcagatgacctacattccgggtacctacaacaatggcaatgtgtactttgcctggatgcgctttcagttttgagacaaatgaagttttagtaacttctttaaaatcaatagctaaaataagtaacatcaaaaataacgcgacttttatcactttttagtaaagttacactggacaaagcgtaccacaattggtgtactggtaaccgacacagcatttgtgtctatttttcatgtaaaggtaattttgatgtctaagattaaaggtaacgttaagtggtttaatgagtccaaaggattcggtttcattactccggaagacggcagcaaagacgtgttcgtacacttctctgcaatccagactaatggttttaaaactcttgctgaaggtcagcgcgtagagttcgaaatcactaacggtgccaaaggcccttctgctgcaaacgtaatcgctctgtaagatacgtcagcaagaattcaaaacccgcttaatcagcgggttttttttggtctttagtgtgcggtactggcgctaaacagccagaatgccagtgcggtcatggcaaaagaccccagaaggttgacgaaaacgttcagtaatgcccagccaaagcggccctcttgtaacaaaaacaccacttctgcgctaaatgtactgaaggttgttagaccgccacaaaatccggtggtgattaatactttccacactggatcaatgttcgtcatcctgctgaaccatgcgaatcctattcctatgatgaatgccccaatcaggtttgctgtcagcgtccccaacggaatcgcctgatgcagtgggttaaatcgcatacttaacagccatctcgccacgcttcccgtaccaccgccaataaaaactgctaaaagaagttgtaacactgcaaaatcctgctatttgatttgtatgagtgataagtgtaacgccgaataatcgtcgttggcgaattttacgactctgacaggaggtggcaatgctggttgccgcaggacagtttgctgttacatctgtgtgggaaaagaacgctgagatttgtgccagcttgatggcgcaggcggcggaaaacgacgcaagcctgtttgccctgccggaagcattgctggcgcgcgatgatcatgatgcagatctaagcgttaaaagtgcacagctgctggaaggcgaattcctcggactttacggcgagaaagtaaacgtaacatgatgacgacaattctgacgattcatgttcctagtacgccggggcgcgcatggaatatgctggtggcacttcaggcaggaaacatcgtcgcccgttatgccaaactgcatctctatgatgcatttgccattcaggaaagtcgccgtgttgatgctggtaatgaaatcgctccgttactggaggtggaagggatgaaggtcggtctgatgacctgttatgacttacgctttccagagctggcgctggcacaggcattacagggagctgaaatcctggtacttcctgccgcctgggttcgcgggccgctcaaagagcatcactggagtacgttgcttgccgctcgtgcgctggataccacctgttatatggtggcggcgggggagtgcgggaacaaaaatatcggtcaaagccggattatagatccctttggcgtcaccattgcggcagcgagtgaaatgcctgcactcattatggcggaagtgacgcccgaacgtgtgcgtcaggtgcgcgcgcaactgcccgtcttaaacaaccgtcgctttgcgccgccgcaattattatgatgtttttttactcggcgcttgattcaccttgttacagattgctattgtgtgcgcgcgtcgaatgaccgttaatattctctggtttttaaggcgcgttctgttgccggttatatgtcaagaaggtatctatgggtgagattagtattaccaaactgctggtagttgcggcgctggtcgttctgctgtttgggactaagaagttacgtacgctgggcggagaccttggagcggccattaaagggttcaagaaggcgatgaatgatgacgatgctgcggcgaaaaaaggcgcagacgttgatcttcaggctgaaaagctctctcataaagagtgacgtggcgagcaggacgctccctcaatatcttgttcgatacaaaaaacccgcttcaaaaagcgggttttttatcagacagatgtaagtaattattacaggattacttaacttccatccctttcgcctgcaaatcggcgtggtaagaagagcggacaaacggaccgcatgcagcatgggtaaagcccatcgccagcgcttcggctttcatttcgtcgaactcatccgggctaacgtaacgttgaaccggcaggtgatggcggcttggctgcaaatattgccccagcgttaacatcgtcacaccatgacggcgcaggtcgcgcattacctcaataatttcttcattggtttcacccagtcccaccatcagaccagacttggtcgggatttccggatgcgcttctttaaagcgttccagcagcttcaggctccagttgtaatctgcaccaggccgtacctgacggtaaatacgcggtacgttttccaggttatggttgaacacatctggtggcgttgcagtcagaatatccagagcacgatccatacgaccgcggaaatccggcaccagagtttcaattttgatttgcgggcttttttcccgaatggcagtaatgcaatccgcaaagtgctgggcaccgccatcgcgcaggtcatcacggtcaacggaggtgataaccacataacgcagcgccatatcggcaatggtctgcgccagtttcactggttcattggcatcaggagctaccgggcgaccgtgggcaacatcacagaacggacaacggcgggtacaaatagcgccgaggatcataaacgttgctgtgccgtggttgaagcattccgccaggttagggcaggaggcttcctcgcagacagaatgcaggccatttttgcgcattgcggctttgatgccctggatacgtgtagagtccgctggaagcttgattttcatccattccggcttgcgcagcagggcttcgcgctctgttgccacgtttttaaccgggataagggccatcttatcggcatcgcggtatttaacaccgcgttccatcacaatgggtttactcatagcgtgcgtgttccagttgcgaattacgaaggaaagcgtttcaattcaatagattgttgtaattatcaactatttttgaattaacgactggcagtatatcattgaaacggacctgaaagcagccaaagcggtcgcgaaaatgtaaaattgttgttggattgtgccattttatcgttctgcgctgtgatctggctgtaacaatactttttcaaaatgcattacggataacatctattactccgtgcaggatgggatcacgcaggctgaatttgttgtagtggatagagaaatctatttgctcctcatttaaggacggaaaaggcagtttttccagcggccagcagcggctaaacaggttataaaaacggctgggaataatcgctaacatgtcactgttggcaaccagtgcagcgattgtcaaaatgttgtagctggtgaaattgatttgccggtccggaaacatttcttgaactctctgccgcagaccgctgaaattttgctcttccggtaacagaagtacatgcgcagcgttgtcgatagtctctctgtcatcttctaaagagagtagtggatttccctcgcggcaaattaacaccatattgtcggtgaacagaacatgatgttgcaccgtacgattggtgcaaaacatgttatcgatgatgagatcggtttgaaactgactgagttggttttccgcgtcgctgatgggcgggttgcgcagtaaaagctgcggatagtgagttttaatcgcccgatagatgacaggaaggaccagtgctccgacgctgggagtggtcgcaatagttatcgttcgttgcttatcatagcttccttcgatatccagcgcgccaagaatggactcaaggccctgactgatatactcatgtagatgcatcgcaaatgcggtaggagtgacaccctggcctttgcgaataaacaatgggtcagggaatataacgcgcagtttctgaatagactgactgattgcgctgggggtcagattaagcactttcgctgcattaacgatccctttatgtacatatacagcttcaaaaatagtcagaaggttaagatcaatatttcgtaaggttgtaaatatttgtggtttaccttcactgctctttctgcttaaacagggttcaatttgattattactatccacgcacttactccaattttattcatggaaaaataatatttaaaaaattacaataatcttatgtctaattggaacggaacgcttttgctcaccataatcaactatttcaataggttaatcaatggggtgagttacggagcaaggcgtggcaccgcatttctgcaagtgataaagaaaatatacaaacgcgaaggagatgtaaagcattagcagatattatgagtaatgacccagtgtaaattgggccattgatgtatggaattaagcggtaatatattcgaagtccggattgtttagtagcgctaaaatattttccagtaaacgtggagcaatattattagtcgtcgcttcgggtttccattgacttattttagccatttccattccggcatacccacaaggattaatacgtaaaaatggactaagatccatattgacgtttaatgccagaccgtggaaactacaaccgcgtcgaatacgtaaacccagactgcaaattttcttttccccaacatagacacctggcgcgtcagcccgaggatgcgcttctatacccagttcagccagggtattcaccactgtttgctcaagcaaggtcaccagttcacgcacaccgagtttacggcgtttcaggttaagcaacacatacatcacctgttgccccggcccgtgataagtcacctgcccaccgcgatcgctctggatcaccggaatatcacccggcattaaaatgtgctccgcttttcctgcctgaccttgggtgaataccggatagtgctcgaccagccagatttcatcaagggtactatcatcgcgggtatcggtgaattcatgcatagcctgggagattggctcgtaaggctgaagaccgagctggcggacaagaattttatcctgatacaaaacggcatctccgtggagaatgagtaaaagtgggggaaaagtatatcacagcgaggagaggggagttacccgaccaggagccgggtaacggagaagcgagttacagaaccatgcggacaatatcgattttgcccagttcttcatacagtgtttcaacctgctcgatatgagtggcgttgatagtgatagatacgctgtggtagttgcctttgctgcttggttttaccgttggggtgtagtcacctggcgcatggcgctgtaccacttcaaccacctgatcaaccagctcaggtaacgcctgccccataactttgtaagtaaaaggagtagggaattcaagcagttcgttaagtttggttttcatgtcagctccggcgtaacgtaattaaatagcaactcccgccagaaggcgggagttttttactgatgcttagtatatggggacggaaattacactttcaagtgtttaatttttaaccaaaccagtgatggaacattaatttaatgtaatcaatgattttgccgaagaagttaccttccgggatttcttgcaacacaaccagcgggcgttgctcgatcgttttgccatcaagctggaagttgatagttccgacgacctgattcttttgcagcggcgcatgcaattcactgctgttcagcacatagctggctttcagatctttcatgcgaccacgcggaatggtcaggtacacgtctttatcaacccctaagctagcgcgatcagaatcaccaaaccaaaccggttcagaggcgaactctttacctactttcagtgggttaacggtttcaaagaaacggaagccccaggttagcagttttttactttcggcttcacggcctttaaaagtacgtccgcccattaccgcagaaatcaagcgcatctggccttcagtcgcagaagcaacaaggttgtaacctgctttgtcagtgtgtccggttttgatgccgtcgacattcaggctgttatcccataacaggccgttacggttcagctggcgaataccgttaaacgtaaattctttttctttatagatgctgtattcattcggtacgtcacggatcaatgcctggccgatcagcgccatatctcgcgcggagctgtactgaccatcagcatccagaccatgtaccgtctggaagtgggtatttttcaggcccagtgcgttaacgtagctgttcatcaagccaacaaaagcgtcctggctaccagcggcaaaatcggccatggcgacacaagcatcgttaccgctttgcaggttaataccgcggatcagctgagaaaccggaacctgcatgcccggtttgaggaacatcaggctagaacctttaaacaccgggttaccggtggcccatgcgtcgttgccgatagtgactaaatcagtttctttaaatttaccggctttcattgcctggccgataacgtaactggtcatcattttggtcaggctggcaggatcgcggcggacatctgcgttctgttcggcgagcactttgccggagttatagtcaatcaggatgtaggactccgcatcgatctgcggtacacccgggatcatagttttgatattcaggtcatcggcatgtgcagcagagataaaggctgtgcaaagagccgtggtgagcgccaggcgcttcatgatacgagcggaaaaaatggtattcatggtctgaactacgacatccgtgatggaattaaaaaagtgccctactatagcaaatgcactaccggcaggcatctgactttccgcgtgactttgttaacgtcatttacagaaattgacacatcagatgcctgctttacgttactgcgcggtagtaataaaactctgtaattgggcttcggtttgcaaacgttgctgcaaggtactggcttcggctttgctggcgaatgggccaagctggatccgccagaccgcgccattttgagttacgcgaccggggacgccgaacttctgtcccagttgctgttggtactgttgcgcacgagcctgatcgcttacggccccgacttgcaccataaagttgccgctggcgctttggctgacggcttgcggtgtcaccattgcagggctggttgcaggcgttgtgctcggagctgtaacaacgggctgtggcgcaggcgtcggttcgctgccttccagtacaccaggcgctaaggtcgttggtgcgccgaggaaaccgctactggttaccggcgcgccggtcggatcttcgctttttagcgtgctattactgaccggaagaatgtcaccctgcgggccagacacactacttgttcccgcgccaccgcttaaatcgggaggtgcaggcagggcgtaagtctgtttggcgactgtggtacaagccataccaggaccagaaaggctaccatcctgggcaacaataatcggatcgatacgaactttggtgttgttactcgtgttaagacggtcagctgccgcgcgagaaagactaataacgcggtcgttgccgtaagggccgcgatcattaatgcgcaccacgatcattcgcccgttagccaggttagtgattctggcgtagctggggatcggaagcgttggatgggctgccgtcagctgtgtcggatcgaatgcttcgccagaggccgtcaggttactgccgggttcggcatcatagattgccgccagtcccgcctggctaaatcgagacggatcctgcacgattttgtagcttttaccgtcgcgctggtaatcctgatttgccgtcgcgttcagtggttcgaaacgcgggtccgccccgctaatttcaactatagggccgttacataccgcaggctgcggtacacttaccgtctgttgctgaccatcatcgcttgtacatgccgcgagcattcctgccgcgatgcagatcccgagccactgcttacgcattgcgcacctcttacacgcttttgctcaacattttcctgtgggtgtggatactcattacaatcccgaacccagccatcagcacaattagcgcgcttcctccataactgaccagtgggagcggaacccctacaaccggcagaataccgcttaccataccaatatttacgaagacataaacgaataatatcagcattaagccgccagccatgacgcgaccaaaggtggtttgcgctctggcggctatccacagcccgcgcatgatcagcagaatgtagagagcgagcagaatcagaatgcccactaatcccagctcttccgccagtaccgcgaagataaagtcagtatggcgttcggggagaaattcaagctgactctgagtgccgtgcagccagcctttgccgcgtaatccgccggagccaatagcaattttagactgaataatgtgatagcccgcgccgagtgggtcactttccgggtccaggagcatcattacgcgctggcgctggtaatcatgcatcaggaagaaccacagaatcggaatgaacgccgctaccagcactactgcgacgccaatcagacgccagctaaggccagagaggaacagtacaaacagaccggaaagcgcaacgaggatacttgttcccaggtcaggctgtgcagccaccagcagcgtgggcataaatatcagcaccagcgcgatgccagtgttcttcaagcttggcgggcaaacgtcgcggttgataaagcgcgcaaccatcagtggtacggctattttggcaatttcgctcggctgaaaacgaacaataccgaggtccagccagcgttgagcacctttagagatggcaccgaaagcatctaccgccaccagcaaaataatacagatgatatagagatagggggcccagccttcataaacgcgtggaggaatttgcgccatcaccaccatgatgaccagacccatcgcgatttggccgattttacgctccatcatgccaatatcctgaccgctggcgctccagataaccagggcgctgtaaaccagcaatgccagtaagatcagcagcattgtgggatcgagatggactttatcccagaatgtttttttattcggattatccgtcatgattaatggtcctccgctgcggcaaccgctggattttccgcaggcagatcggtgttgttatcacccagcataatgtggtcgaggatctggcgcatcagtgtaccaaccgccggacccgcaccaccgttctccagaatcatggcgacagccacttgcggattgttgtatggcgcaaaggcggtcatcagtttgtggtcacgtaaacgctcggcaattttgtgcgcattataggtttcgttcgctttcagaccgaagacctgagcggtaccggatttcgccgcaattttgtacggtgcgctagcaaagtatttatgcgccgtaccgttagggcggttagcaacaccgtacataccgtctttcgccagctcccagtaaccggaatgaatatcgccgacgggcggttcatgcggctgtacccatggcacctgtttgccgtcttcggcggtgctcatcagcaaatgaggaaccttcacgataccgtcattaatcaggatcatcagtgccttactcatctggattggggtcgctgtccagtaaccctgaccgataccaaccggaatggtgtcaccctgataccacggttttttaaagcgtttctgtttccattcgcgggtaggcatgttgccggaacgttcttccgccaggtcgataccggtgtaatgaccataaccgaatttacccatccattcggagaggcgatcgatccccatatcgtaggccacctgatagaagaaggtatccgcagattcttccaggcttcttgtgacattcagacgcccgtggccccattttttccagtcacgataacgtttttcgctacctggcagttgccaccagcctgggtcaaacagcgtcgtattgcgcgtgatcaccccggcgctcaatgcgctaaccgccacatagggtttaactgtagacgcgggaggataaaccccctgtgtggcgcggttcaccagcggtgtattcggatcgttcaacaaggcggaataatctttgctggagataccgtcaacaaacaagtttgggtcataactaggcgtggaaaccagcgccagcaccccacctgtacgcggatcggtgactaccacagctgcgcggctacccgccagcagcgtttcaatatattgctggagtttgagatccagcgtcaggtaaatatcgtgtccggcttgcggtggtacttcttttaactggcgaataacacgcccacggttgttaacttcaacctcttcataaccggtctgaccgtgcagcacatcttcatagtaacgctcaatgcccagcttaccgatatcatgcgttgccgcatagttggccagtttgccgtcattattcaggcgttcgacgtctttatcgttgattttgctcacatagccgatgacgtgggtcaacgcgctaccgtaaggatagtaacgacgtttatagcctttaacttcgacacccggaaaacggtactgattgacggcaaagcgagctacttgtacttcggtcaggttagttttcaccggaatagaggtgaaacggtgactacgtgcgcgctcttttcggaatgcagcaatatcgtcatcggtcagatctaccacgctgcgcaaagcgtccagcgtttgctgcacgttatcgactttctccggcatcatttctatctggtagatagtgcggttgagggccagagggataccgttacgatcgtagataatgccgcggctgggcgcgataggcaccagcttaatgcggttttcattagagcgggtctggtagtcggtaaagcgaacaatttgcagattatacaggttggcgataagcacgccggtcagcagcaaaatccccaaaaaggcgaccagcgcccggcgcacaaacagcgcggactctgccgtatagtcgcgaaaagagttctgtagtttcatccgctgcgttttctactcaaagctcccttatcactcacggtgataaggatggttggtggtgatgctccacgcccggtacagactctctgcgaccagcacgcgaaccagcggatgggggagggtaagcgcgctcaggctccagctctgctcagccgccgctttacaggcagggctcaacccttcaggcccgccaatcagtagactgacgtcgcgaccatccagcttccagcgttccagctcagcggctaactgcggcgtatcccagggcttgcctggaatatcgagggtgacaatgcggtttttgcctgcggccgccaacatctgctcaccctctttgtcgagtatgcgcttgatgtccgcattcttgccgcgttttccggccggaatttcaatcagctcgaagggcatatctttcggaaaacgacgcaggtactcggtaaaaccggtttgtacccagtccggcattttcgttcccacggcgacaagttgcagcttcacgcattaactccagagtttttccagttcatacaggcgacggctctcttcctgcatgacatggacaatcacatcgcccaaatccacgacaatccagtcggcgctgttttcaccttctacgccgagcggtaacaggcccgctgcgcgagactcctgcacaacgtggtcagcaatggacataacatgacggctggacgtacccgtacagatgatcatgcagtcggtgatgctggatttgccctgaacgtctaaggcgatgatgtcctgacctttgaggtcatcaattttgtcgataacaaaatcctggagtgctttaccctgcaagttttccccctgggtgaatcaaatagataaaaatggtctgtcagtatacctgaaccagaggcgatttcgggacaattgtcgccgaatcggctttcgaaagtgggctatcatcccaccccgcgccgcagattgcatcgccatttttgtaaaacaatttctacaaagtcgtgtctggcggaaaaagtctggctgcggagaatatcagcctgcccgggtctgtcaatggtcgttgcggcttacccgtaaaaaaacagaaaagtcatgcattctcgaccccgatggcacggctattgaggacgcgtagcgtcgcgaatttttggttgatatcaatggcgctccaacacccctggtcaacgcgaaaatgccacatagcttcggcaggcatgccaattaaacgggcgattaacagactcagtacaccctgatggctgacgactaaaatattctgatagtgctgaaattcactaagccttgcgataaagcgttccacacgttggctaaatgcctgaaatccttcaccgttcgtggggattgcatgctgccagtcattgcaccacgcgctatagttttcggcatcttcttgcatgaggtcgcgatgatgtcgcatctcccagtcgccaaaaaacatttcgttgagttcaggtatgatttgcacggggagctggcggtcactgagaaccagtcgcgcggtatgctgtgcccgttccagttcactgcataaaaccagatcaaaggaaacaccatgtagcagcgtatgcagattttgcgcttgctcaataccgcgcgcggtcaggggggtgggcgcatgaccgctgtaaagaccatcgatattcgcttgcgtttcaccatgacgaattaaccacagtcgcatcatgccctccgtaacgacaggtatcagcgatacaagccttgttggttaatgtaagtcagtaccggttccggcaataaatcctcacaactttcaccgttttgcaaacgttcgcggatgatggtcgcgctgatgttaaaccacggcgtttcagccagataaattttaccggcaggctgaaggtgaagatcttccgggttatgtgtcaaatgatcttccagccattgctggtattgcggttgcgccatttcaagtgggtaacctggacgccgacagacgatcaaatgtgcattgtcgagtatcgtttcgtattcgtaccaggtcggaaaggtcagcagactatcctgaccaataataaacgccagcggcacgtccggtccttgttcctgccgccactctttcagtgtttgcgcagtgtaagagggggcattgcgctttagctcgcgttcatcaagagtaaataatggcttgtcggcaatcgccagttcaagcatgtgtttacgctgcacgctgttcgcttccggctggggacgatgcggaggaacattattagggatgattgtgacccgcgtcagaccaatcaaattcgccagcgtttccacgggttttagatgaccatagtgcaccggatcaaaggtgccgccaaacagagcctgtaaagatttcatatcaaccgtcgataaatacgtccgccaggggtttatggcacaacagaagagataacccttccagctctgcccacacactctgaccgtaatcttgtttgagggtgagttccgttcgtgtcaggagttgcacggcctgacgtaactgcgtctgacttaagcgatttaacgcctcgcccatcatgccccggcggttctgccatacccgatgcttatcaaacaacgcacgcagtggcgtatgggcagactggcgtttcaggttaaccagtaacaacagttcacgttgtaatgtgcgcaacaaaataaccggttcgctgccttccagacgcagttgctgaagaatatgcaatgcgcgcttactttttcccatcaacaaagcatcaacccaatgaaaaggggtgaaatgcgcggcatcattcaccgcctgttcaacgcgcggtaatgtcaatttgccgtctggccagagcaggcttaaacgctccagtgcctgagccagcgccagcaggttaccttcataacagtagcagagcacctgatttgccgcgtcatccagttctaagttgagctgttttgcgcgcgcagcaacccagcggggaagctgagcctgctccggtgtctgacaggtcacctgcacgctgcgattcgcaagcgcagtaaaccaggcggcattttcttgcgctttgcttaatttattaccgcggacgatcaacagcaggtcgtcatgcagaagtccggtgagtgtgagaagttgctcattgatcgccgcattcggtccgttttctggtaacaacagcaatagcgtttgtcgactggcaaacagactcatagcctggcataagctaaagatcgcattccagtcagtgttgggatcaatggaaaaagtgtggtgttcttcgaatccttgtgccgcagctacctgacgaacagcgtcctggctttcctgcaataacagaggatcgttaccaagtaaaagatacgccgcgcgcagcccttcattgagctgcgcgcggagttgttccgggtacaaccgaatcatcagttacccagcgtggtggagacgcgtgcaggcgttgccggagtatccgttgtggtgctcgtctgttcttcgtcggaacgaatatccgcagcacggatgcttggcagcttacgaatcagctgttcggcagcacggtcgtacatctcttttacgatcatgtcttgttcgttatctttcgctaacgccatttgcgggttatcgaagaagctacggaagactttggcgctaatcgggtagatatcacggccggggatcaacacggtcgcattaaccgtcatgatcatctgatactctgctgtttgaccgttacggaatacgcttgcggtatctttcgcgatgctcactttacccaaacgcaaggatggaacgtccttacgcgtggtttctttatcaagcaactcgacaccattcagacgtaactggttacgcaccgcacggcttaatggcccgttcggatcgccactgtccaggatcatgaccttcatagtggaaggaacctgcgtggtatcacgcagatgccagccacacccggcggtgattaacaccgccagagataacaacaatgttgccagatatcgcacgcttcctcccgcgcttagccaacgaccagattgaggagtttacctggtacgtaaatcactttacgtacagtaacgccatcaagatattttgctaccagatgttcctggccagcacgttcgcgaacctgttcttccgttgcgtccaccggaacggtgattttggcacggactttaccgttaacctgcaccacgaccagcgtggagtcttccaccatcgctttttcgtcagcaaccggccacggcgcgttgtcgatatcgccttcgcctttcagttcctgccacagcgtgaagcagatgtgcggggtgaacgggttaagcatacggacaacggccagcagtgcttcctgcatcagagcgcgatcctgctcgccatcggttggtgctttcgccagtttgttcatcagctccataatcgccgcaattgcggtgttgaaggtctgacgacggccgatatcatcggtcactttagcgatcgttttatgcacatcgcgacgcagcgctttctgattttcagtcagcgcatcaacgttcagtgccgcaacatcaccttttgctgtgtgctcgtaaaccagtttccagacacgtttcaggaagcggttagccccttccacaccggattcctgccattcgagagtcatatcagccggagaagcaaacatcataaacagacgaacggtgtccgcgccgtaacgttcaaccatcacctgcgggtcgataccgttgttcttgctcttggacattttgctcatgccggtataaaccagttcatggcctgccgcatctttcgctttcacgatacggcctttctcgtcacgttcaacgatagcatcaaccggggaaacccagttacgttcgccgttttcgccaacatagtagaaggcatctgccagcaccataccctgacacagcaactgtttcgctggttcgtcagagttcaccatgcctgcatcacgcatcagtttgtggaagaagcggaagtagagcaggtgcataatggcgtgttcaataccaccaatgtagatatccaccggcagccagtagttagccgcttcggaatccagcataccttctttgtactgcgggcaagtgtagcgcgcatagtaccaggaggactccataaaggtgtcgaaagtgtcggtttcacgcagtgctggcataccgttaacggtagttttcgcccactccggatctgctttaatcgggctggtaatgccgtccattaccacatcttccggcaggatcaccggcagctggtcgtccggggtcggcattacggtaccgtcttccagcgtcaccatcggaatcggcgcgccccagtaacgctgacgggaaacaccccagtcgcgcaggcggtagttcactttacgctcgccaacgcccatcgcagtcagtttatcggcgatggcgttgaaggccgcttcatggtcaagaccgttgaactcgccagagttgaacagcacgcctttttcagtcagggcttgctgagaaagatctggctcagagccgtcagctgccaggataaccggtttgatgttcaggccgtatttagaggcaaactcgtagtcgcgctggtcgtgccccggtaccgccataactgcgcccgtgccgtactccatcaatacgaagtttgctgcccaaacgggaatttcttcgcccgttaatgggtgaaccgctttaaagccagtatcgacgccttttttctccatcgtcgccatttcagcttcggcaactttggtgttacggcattcgtcaataaaggccgccagttcaggattattttccgccgctttctgcgccagcggatgacccgcagctaccgccaggtaggtacaacccataaaggtgtccgggcgggtagtgtaaacggtcagcgtgttgtcatagtcgttaacgttgaaggtgatctccacgccttcggaacgaccgatccagttacgctgcatggttttaacggtgtctggccagtgatccagtttatccagatcgttgagcagctcgtcagcgtaagcagtgattttgataaaccactgcgggatctctttacgttcaactttggtatcgcagcgccagcagcagccgtcgataacttgttcgttcgccagtacggtctggtcgttcgggcaccagttgaccgcagaagtcttcttatataccaggccttttttatacagctcggtgaagaatttctgttcccaacggtagtattccggcgtacaggttgccagctcgcggctccagtcataaccaaagcccagcattttgagctggtttttcatatacgcgatgttgtcgtacgtccacggtgccggagcggtgttgtttttcaccgccgcgccttccgcaggcagaccaaacgcgtcccagccgatcggctgcaggacgtttttgcccagcatacgctggtagcgggcgatcacgtcaccgatggtgtagttacgtacgtggcccatgtgtagtcgaccagaaggatagggaagcatagacaggcagtaatacttctctttgctctcgtcttcggttacttcaaatgtgcgcttctcatcccaatgaagctgtactttggattctatctcttccgggcggtattgctcttgcatggcagccagtggtcctgttttcaatacggctacaaatgtagcgttgaggtggtttttcagatccgcatagcatagcccaaacgtccgcgtcaaaacagcctttcgcgcactcgacgttgaaatgatgcccggattattcatacattaatttacagagtttgtgggcgtattagcaaagcaaggaacaaagaacgtctattattatagtcagttaacgacccgggagatgaaacgatgaacaaggttgctcaatattaccgtgaactggttgcgagtctgagcgaacgcctgcgcaatggcgaacgtgatatcgacgcactggtggaacaggcgcgcgagcgcgtaataaaaacaggggagttaacgcgaaccgaggtcgatgagctgacgcgagctgtcagacgtgacctggaagagttcgccatgagctatgaagagagcctgaaagaagaatctgacagcgtctttatgcgggtgattaaagaaagcttgtggcaggagctggcagacatcaccgataaaacgcagcttgaatggcgcgaagttttccaggacctcaatcatcatggggtttatcacagcggagaagtggtcgggctgggaaatctggtctgcgagaaatgtcacttccatctcccgatctacacaccggaagtgctgacgctatgcccgaaatgtggtcatgaccagttccagagacgcccgtttgagccgtaatagtctgatttcgcacagcaataaagagaatatgggccgaatgaaattccccggcccttgtttttatctttacagtaaatcttcagtctcacgaatttcctgactgacatctctggttccggaactctgaactttacgatacaggtcgagagcctgtcggagatcgacaggtcttccttctccgtagtgatacataatggccaggttataccaggcagtggcgtcattgcattcagcggctttcgtaaaccattcaaaggcagcctgataatctttctcaacgccttgtccgtgtttatacatataaccgatgttgacgtaagcgccgacgctcccctgagcggcagccttcagataccagtacatcgcttgcttatagtcctggtccaccccttcgccagcgttataatcccatgcaatttgaaactgggcgtgccgattaccctgctgtgcgcttttcaaataccagaatgcggcgagtgtcttgttttgagcaacgccttttccgtcttcataaagatcggccagattgttttgcgcgtcactatggccttgtaatgcagcttgtttgtaccagaaaaatgccagcgcatagtcttttgcgactccgttgccatttctgtacatccacccaagattattttgcgcataagacattccgctctccgcggctatctgataccagacaaccgcttctttataattgggggcttctccacgatccagtgtccagccaagggcgttggaagcgaaagtatggccttgtagggcagcttttttcagccagaagatggcttgctcattatctttatgacggcttttatcctcggtatacttttgccctaaggaatactgtgcttcacaatgaccttgctcagcggccagcttcagccagtaaaaggctttttcgtcgtccggagaatcaattgcgctatcgcgattataataaaacccaacaatatattgagcctcgcaatcgcctttttcagcacgttcgataatctcatctatacttaaattatcgcagcaactactcgtgaaaatcattatcatttccttatggttgcagataaaacatattatatttttatgtgttccatttttgcgtaagccttattttatgcgtattatgtcgcgtcagaaaagtataaataaacgagcctcgcaatgcggctaatattcatttaatgaatatttaaggataaattatatggacatggagagccaaaaaatattgtttgcactttccactccgatggaaatacgcaatgaatgctgtttacctagccatagtagtcccaaaatgtatttaggtacatgcttttttgacctttcttccagttggggaattgatgaccgtgatgacctgctgcgcacaattcaccgaatgatcgataacggtcatgccgctcggttggcagggttttatcaccgctggtttcgttatagcccatgtgaatggcgtgactatcttgctgaactaaatgagcaaggtcaggcttatgcgcaatttgtcgccagcaccgccgaatgctgtggcgaagggggaatcaaagcctgggattatgtccggatgggttttttaagccgaatgggcgtacttaataactggttgagcgaagaagaaagtctatggatccagagccgcattcatctacgggctctacgttattatagtaactggcggcaatactttgccggttatacctttggtcggcaatattggcagtctcccgaagatgatcatctgcctttattacgcgaattcttagcgcgtaaagaatacgacgattccggcaatgatatgttttatcaattatttgccagtgatgatgcgtattaccctaccttgtcctggcaaccattggcttactattctgcatgcccggaaacgcttaaggatatgagcgacctatgaaaaattgctggaagatcctcgatatagaggaaacgactgacgtcgatattatccgccgcgcttatctggcgctgttaccgtcctttcatccagaaaccgatccgcagggttttaaacaacttcgtcaggcgtatgaggaggcgctacggattgcgcagagccctgctaaatctgtttggcaaccagaagaatatgaggtagcagaacatgaaattctgctcgcctttcgtgcgttacttgcctctgatagtgaacgttttctgccctccgcctggcagcgattcattcagcaattaaattattgcagcatggaggagattgatgaattacgctggagcctgtgcacaatcgccatgaacactgcccatttatccttcgagtgcgtggtgttattagcagaaagattgcggtggttacaggaggaaaataccggggaaatagacgaagaagaactggaatcctttttatatgccattgcgaaggggaatgtttttaacttccagaccattctgcatctgcccgttgccgtgcaaaatgacaccatcgatttttaccaaatgttcgctcggatttggagtagccatccacaatggctgacattgtatttagcgcaacatcgcgcagtgattatccccgatgatgcaaaactgcacagaaatttactccgctggtatagcgcaggtcgcctggatatccccgaacttctggattacgcccagagttggcgggaaactgaacctgataatgaagatgcgccttattatgaatacgcgcaacgcgtctattgtggagaaggcgaaagcctgttggcagaactttgtgactactggcgcgagtatccctccacccaggcggatgctttaatgttgcaatggtgccgtcagcatcgggtcgattattacccattactggtgatgatgattgaagcgcgtgatctggttaacgatcagggaaaaccgctactttatgtccccggcgacagcgcccgtacgcgttttcatttatacgaaatactcagcgatgaaaaactctctgcgctggggcgtagtctggtcgagatggttttgcacaaaggacgtaagccgcggatcagtctcacgcgtgatacagaacataccttatggccattatatctagttgccaaacaattagtgcaggcctgccaacctacagaagaaagtttaatgccgattgtgagccgccttgatgcagaaaatcgttgtccactggaagcattaattattcgtcgattattaattcaggcggcgaattttaccgagaagcaaactgttgaaccggagccgcaaccgcagccaatgcccgttgacgatggtgggccaggctgtctgggcatcattaaaattattttctatatttttatctttgctggtttgatagggaaaatactccatctgttcgggtgacagtcgacgttaatgtgcgggaagcccggcaagtaatctttccgcatttttgtaatgttgtttggcggtcagttttaaccatttttgagattcataatggttaacattaataccactgccatttctgtagatcaaacctaaagtatattgagcatgagcatacccttgttcagctgcttccttataccagagaattgctttacgggtgtcgggtttgacccccagacctttgaggtagatccaccccagtttactttgcgcgcgtggattttcctgttccgcactttgctcataccagtatctcgcctgtgtataatccagtggtttaccgtcgctaccatgaagataaaattctccaaggcgatattggctcgtactgtgaccatgaatcgcggaaagctccgtggctgccgtggtgaatggaagactgcccggactgcttaaataatcaaaggcataattcaccatggctttatcacgcaacgtcgttttcttgggttggctaatacaggtaattgctgcaactataaaaattgcgaatatatacattaattttttattcatgtgtgaatgcttcgattttctttttattttgaaagcgtcaagtttatactcatcaataataaaaaagtagtcagttaatgcacttaagggattattaacaaatgaataaggaagaacaatatcttctttttgcgctttctgcgcccatggaaatacttaatcagggttgcaaacccgcgcatgacagcccaaaaatgtatactgggataaaagaattcgagctcagtagttcctggggaataaataatcgtgatgatttaattcagactatttatcagatgactgatgatggtcatgccaatgatttagctggcttatatctgacatggcatcgctcttcccctgaagagtggaaagcattaattgctggtggcagcgagagagggttgatttatacccaattcgttgcccaaaccgctatgtgctgtggggaagggggaatcaaagcctgggattatgttcgaatggggtttctgagtcgggtcggtgtgctcaacaagtggctgacggaagaagagagtttatggctgcaaagccgcgtctatgtacgagctcaccattactatcacagctggatgcactatttttccgcctatagcttaggacgtctctactggcaatcttctcagtgcgaagacaacactagcctacgcgaggcgctaaccctgtacaaatacgatagcgccgggagtcgtatgttcgaagagctggcagcgggaagcgatcgtttctatgccacgcttccctggcagccattaactgtccagtctgaatgcccggtaacgcttaaggatgtgagcgacctatgaaaacatgttggcaaatcctcgaaattgaaagcacgacgcaaatagacattatccgccaggcttatcttgctcgcttaccgttgtgtcatcccgaaaccgatccgcaagggtttaaagcattacgccaggcctatgaagaggccctgcgactggcggtaaatcctgtcgaggaagcagatgatgaagaaaaagatgctgccgctgaacatgaaatactacgtgcattcaggacattactggatagtgaaagtgatcgttttcagccttccgcctggcagaaatttattcagcaattaaatacctggaacatggaggatgtcgatcaattacgctggccgctgtgtgcaatcgccatagaagcgcgatatcttagtttaaattgtgcttctttgctggcagagcgtttgaactggcatagttttaatgacagcgaaggaatggatgaggaagaaagggaggcttttcttgaggccattcaggctggtgattgtttcgatttccttagccttctggaatatcccattgcgttgcagaaccagactgttgagtattacttcgcgctggaacgttgctgccgttaccatcctgactatgtcactgcgtttttggcgatggaaggtccgtggttaattcctgatgatgcaaagttacatcgcaaactgttgcgctggtacagcagcgtgcaaacaggtatggcggaactcattcctgtcgctcaacagtggcaaacggaagaaccagaaagcgaagatgcccggtattacttgtgtgcacaacgtttgtactgcggcgagggggaaagcctgcttgccgatctctgcgcgtactgggaaagttacccatctacacaagctgataatttgttgttgcagtggagcaagcgtcattgcccggattatttcgcgttattagtgatggttatcgaagcgcggagcatggtagatgcgcaaggtcaaccgctgaaatatgttcctggtgagagcgcccggacgcggctgttatgggcggagattttacatagcggaaaattaagcccgttaggtcaaagctttattgagagcttattcttcaagcgcaaagcatgggcgtggtggaaaagcagagtcggtagcgagacagagcaagatagtccgttcctggatttgtatcgggtagcggaacaggtagtacttgaagcgtttccgaaacaagagatgctggcccgtcttaatacaaggctggaaggcggagatgctcatccattagaggccattgtcacccggatgcttttgacgaaagtgaaactcgagccggaggatgaagatgtcgatgagccaacacctgaaaatcatgaagaaaaaaatgatgagggtgaaaaaccacagagcattaccagcattatcaaaatcagtttaacggtgctggtgataggttatgctctcggcaaaatcgcgatgttgtttagctgacgatgtgttttttgcgccgatgccggatgcagcgtttacgccgcatccggcagccgtgtttatgggatctcaatggctaaataatcgctcgcccgccgccgaacttcatccacgcgggccatatcgttactctgcaacgccgcatcaaaatcggtgatcacccggccgatctcttctcgctcgtcacccagcgcccgcgcccacaactcttccagtttggctttaaaggtgcgattgatgagcatatcgcgcggataaattttcaatgcggataaccgcgtccgactctcttcaatctgctgcgcgctcaatgttaccgggctgtggttaatcactctggacttaacgctgccgtcttccagaagcacgtcaacttcaagcaacccgttgatatcataactaaagcgaatatcaatgctctgataagccccggttttcttcaacggcacatcgaaggattccaccagaatgttgtttttaactttgtggttttctccctgatagacgttaaccgtaatactatcctgttccgggtgcatggtactataagtttctacacggctcacgggcacagtggtgtttcgttcaataatcgggctgaaaatgccggaaacgccctggcggttaacttcaacgcccaagctgtaagggcaaatatcagtgaggattacctcttcaatatcttcactgcgtaagcggcaggcggcctggattgctgcgcccagcgcgacaatggtgctcggatcgtaactttgatacggtaatttgccaaacagacgcacggcgattcgctgcaccagcggcatttgactcgcgccgccaaccagcaccagactgtcgatttgactcggcttcagacgcgcatcgcgcaacgcctgttcaatcggcactcgcaagcgattgagcagcggcaaccacaaatcttccagttcgttctcgtaaaattcgcattcccgcgtttcttcctgatactgccagcgaatgtgcaatgggctttgattgctacattttgccgcttccacacaggcgtacaaggctgccagttcactctcgttaagcgtggtcctggcgacatccgcgcgttttaaaacctcatcgaccagcatatgggtaaaatcttcgccaccaagaaagttgtcgccagcggaggcgtgaacttcaatcaccggcgtggcgtactcaagcaccgtaacgtcaaacgtgccgccaccgagatcaaacaccaggctacgggtattttgttgggtatgcaggccatacgccatcgcagctgctgtgggttcattaattaagcgtaccgcatttaacccggctaactccgctgctaaacgggtatgcttgcgttgttcatcgctgaaataagccggaacggagatcaccacatctttaatcggacgttgcagaaattcttcggcatcttcttttaaactgcgtaataccaaagaggacagttctggcgcgttaaatgtgtcgctgcctaaccgccagttggtattactgcccattgcacgtttaaataacgctgccgttttatccggatggctagtacgccgacttacagccggttttccgactaaaatatgattattttcatccatgctaattatggatggtgttaaatattcaccgaacttatttggaattaattgcgcggcaccgtctttccagacggcaattaaactattggtagtaccgagatcgataccaatggcgagttctgcattatccattgcatttatatcttgaaagaaaaagagataaacagattaagaccacccaggtaacgcgtggtgatcttaatcaatgacgtgtgttaagcgtaaaatttcagacgatcagccagtaaatcaacaaagccctgacgatcaacatcgaccattacggtggcattcggtttattgcctgtcagataataataatcaacaaccgtcataccctgggtatatttcccctgtgtttccacgccaacccagcgctcaacagaggtaaataactccggtttcaacagccaggcgatggtgcatgggtcatgcagtggtgcgccgacaaagccccatttttcgtctttatgatattcgaggaagaaatccagcagttcggcaacaatggtactaacagggttaccaatcgcgcggaaacgctcggtgtcttcaacgtggatttgtgctttatgagtaacatccagaccggccatcaccaccgggatcccactctggaagacaatttctgccgcttccgggtcaacgtaaatattaaattcagccgcaggcgtccagttacccagccccatagcgccacccataatcacgatacgggcaattttgctatgcagttccggatggctattgagcagcaaggcaacgttagtttgcggtccggtagacacaatggtgacaggttccgcactttcacgcagcgttttcgccatcagctctaccgccgtacagttttgcggtgcgaatgtcggttccggtaatgccgggccgtcgagaccgctttcgccgtgcacattgtccgcgataatcaactcacgcattaacggttttaccgcgccgcctgctaccggaatatcggtgcgattaagcaaggtcagcatacgcagaacattgcgtaaggttttttctggtgtctggtttccggcggaagacgtaattgctttgacatcaagctctggactggcgagggcgagaactattgcgatagcgtcgtcatgacctgggtcgcaatctaacagaattggcagtgccattgttgctccttgttgtgtgcttctttgcgacaagggtaacgccaggatgtaacagatacgaggggcgaaacgataaagcgtgagatggcgcgcaattgggtatgcgcgccagagtgattaatgcaggattttcgcgaggaagtcttttgcgcggtcgcttttcggatcatcgaagaaagcgtctttcgggctgtcttcgacaattttaccctcgtccataaagatcacccgattcgccactttacgggcaaagcccatttcgtgggtcaccaccatcatggtcattccttcgttcgccagttccaccatcacgtccagtacttcgttgatcatctccggatccagcgcgcttgtcggttcgtcaaacagcatcgcaataggatccatacacaacgcgcgagcgattgccacacgctgctgctgaccgccggaaagctgcgccggaaacttattggcgtgagcagaaagcccgacacgctccagcagtttcagggctttttcacgagccggcgctttatcgcgtttaagcactttcacctgcgccagggtcaggttttcgataatgctcagatgagggaacagctcgaaatgctggaataccatcccgacgcgggaacgcagctttgccagatcggttttcttgtcgttaaccacgataccatcgacggtgatttcaccttgctgcaccggttcgaggccgttgacggttttaatcagcgtacttttgccggaaccagacgggccgcaaaccaccaccacttcgccttttttcacttcggtactgcagtcggtcagcacctgaaagtgaccataccatttactaacatttttcagggtaatcattatgctgtccttcttttcaagtagctgaccaacaagctcgcgctaagactaataacgaaataaacaaatccggcaaacaggatcatctcaacctgcgtaccatcacgctcaccaatggtactggcggtacggaagaaatcggccagggataacacatacaccagactggtatcctggaacagtacgatgccctgagtgagcagcagcggcaccatcgcgcggaacgcctgcggcagaataatcagtttcatgctctgccagtgagtcattcccaacgccagcgcggcgctgctttgaccacgagaaatactttgaataccagcacggataatctcactatagtaggccgcttcaaacatgctaaacgccaccatcgcgctaattaaacggatatcattttttgggcttaatcccagcacgttttgcagaaaacccggcacgatcaggtaaaaccacagcaaaaccataactaaaggaatgctgcggaatacgttaacgtaggctttggcaaaccacgccacgggcgcaaagctggataaacgcatcaccgccagcatcgtgccccacaaaataccaatcactaccgccgtgacggtgattttcagggtgatcaccagcccgtcgagcagatatggcagggaagggacaatggaactccagtcaaactcgtacattatttgccccccatgttgccaggcaggcgaactttacgttcaaccagcgtcatcaccagcatgataaaagcgttaatcaacacatacgccagcgtaatggcggtaaagctctcccaggcatgggcactgtaatcgagcaatttacccgcctgcgccgccatatccaccagaccgatagtgctggcgatggcggagtttttcaccaggttcatcatctcactggtcatcggcgggacgataacgcgataagcattaggcagcagtacgtatcgataagcctgcggtagcgtcaggcccatcgccagcgcggcatttttttgccctcgcggcaggctctgaatcgcggcgcgtacctgttcgcaaacacgggcggcggtaaacagccccaggcagagcatggaactaaggaaaaactgaatattgggatccagctcggccttaaaccacatgccgattttctccggcagcagctccgggatcaccagataccaggtaaagaattgcacaatcaacggcacgttgcggaacagttcgacatacaacgtacccagaccagagagaaaacggtttggaacggtacgtaaaatgccgaaaaaactaccgacgaggaaagcgataatccaggcgcagatgctcaaagcgatcgtcacctgaaaaccactccagatccaaccaagataggtggtgttgccgaacggggcttgttgtaaaaaaataccccagttccagtctatagacataaatctactccagaaaaaagagggtagcagcgttaactgctaccctcgaagattgttacccagcgtattgcggttttcaggcccgatggggaacgaccatcaggcgtatagtctgtccgtgctacgtaacaatcgagagggctggaatttccgcccctggttcttgtaattagttcagtgccttgtcattcggttctttgaacagtgctttcatttcgtcactcagttcgaaattcatgttcaggtttttcggcggaattggatttttgaaccacttatcaaaccatttttccgcttcaccggaggtctgcacctgagcgatggtgtcatccatcagctttttgaactgcggatcatctttacgcaacatacaaccgtaggcctcctgagactgcggcttgccgacgatttcccagttgtctggtttcttcgctttcgcacgttcaccggccagcagagcgtcatccatcataaaggcaacggcacgaccgctttccagggtgcggaaagagtcaccgtgatctttggcgctgatgatgcgcatattcattttttgctcttcattcagtttgttgagcaaaacttcagaggtagtgccggaagtgacgactacggctttgtctttcaggttggcaaaatctttgatatcgccaccctttttggtcaacaggcgcgtaccgaccacgaaaatagtgtcagagaaagccgcctgtttttggcgttcgacgttgttggtggtagaaccacattcaaaatcgaaagtgccgttttgcagcagtggaatacggttttgactggtaatcggaatcagttttacctgcaagtccggtttgttgagtttctttttcactgcttcaacaatggcgttggagtaatcctggctgtaacccaccactttttgctgattgtcgtaataagagaaaggcacactagattcacggtgaccgacgacaatcacaccgtttttggcgattttgtccagagtactgcccgctgccggggcggcgtcatctgcctgtgccagtcctgcggaaagcgccagggcgaggattgctgtggcaggtttacgtaattgcatatccaactcctttatcttctgcgttaagaacgcatggatacccgttgtgagtgtttgtgttgttatcgtctgcaactttattgtgcagtgttgtgcctgttagggaaggtgccttaggtaacatttagtttggctaaatgtaaagatattgctgttttattgtttgtttttgcgagatgcgccgcaccattccgaagcaaaattcttaaaatgcactcttttagtgctaccgctggattactgtggtgcaactaggttgtactgatgctgtttcagggtttgccttgtataacaaagcaatagatgtgccaaagttggataggagaatattgttatccggataatgcactgatgccgcatccggtgagcgtgccgaaatatgggatgtattccggcacgataagaagggattatttacgtcgctgacgcagactcatcaacacagcagcaaaaccaaacaatgccgtcagcacccacagcggccagttgccggtacgtgcgtatggtgtgagtccggtggtcggcgtcacgttagtggttaacacctcgcgggtgaactgcgggatcatcgcctgaatctcaccctgcgggccaatcaccgccgtaatgccgttgttggtgctgcgcaacagtgggcgcgccagctccagcgcacgcattcgcgccatctggaagtgttgccatggaccaatagatttaccaaaccacgcatcgttggagatagtcagcagatagtcggtatccgggcggaagttatcgcgcacttgctcgccgagaatgatctcgtagcaaatagccgcagtaagctcaataccatttgcgctcagcggcggctggatatatggcccacggctgaagctgctcatcggcagatcaaagaacggtgctaacggacgcagaatgctctccagcgggacaaactcgccaaacggcaccagatggtttttgttatagcgatcggcactttcgtagctgtacggcgcacctttacccagcgtgatgatggtgttgtaggtatcgtagcggttctgcttattgagacgcgcgtcgacaatcccggttaccaggctgctacctttatcacgcaactcaccgtccagtgctttgaggaacggttgctgattaatttccagatcggttatcgcgctctccggccagataatcaagctacttttgcccatcagcggtgccgttgcgttgtagtaaatcttcagcgtattaagaagctggccttcgtcccatttcaggctttgcggaatatcgccctgaaccatgctaacctgaatggttttctccggttgtggggtaaaccactggatgtaacgcagcgggaagggaagggcaaacagcacgacggccaccaccagcggacgccagttgcgtttgaccaacgccagtgccagcaggccactaaccatcatcagcaggaagttaatggcttccacgcccattatcggtgccagcccttttaacgggccatcaatctggctatagccgaactgtaaccacgggaagccggtcagtacccaaccgcgcagaaactcggtcacttgccagagggcaggggcggcaatcgctacgcgcagccaggtggttttcggccacagacggctcagcacgccagcaaacagtccggtatacaggctcaaatacgccgccagcagcaccaccaggaagatgttaaccgggccaggcattccgccaaaggtcgcgatgctgacatagacccagttaataccgctgccaaagaggccaaatccccagcaaaagccaatagcggcagactggagtggacggcggttaaaggtcaacgcctgaagccccatcaggctaataatcgccgcaggccagacgtcgtaaggagagaaggccagcgttccgcaggcaccgaataataacgccagcagcaggcgaatgcgctggcgttcaattaaactggcaaaagccatgtagttatctatccagtttcggttttattcatccagcttcggctggggactgtcatccgggattttgacatgaacctgaataatacgccgactgtcggccatcgccactttgaactggtaaccgtcgatgtcgatagtttcgccacgcgccggaagatgcccaaatgcctgcatcaccagaccaccgatagtgtcgacttcttcatcgctaaagtgggtgccgaacgcttcgttgaagtcttcaatggaagccagtgcgcgtacggtccaggtatgacgactcagctgacggaagtcgatatcatcttcttcgtcatactcgtcttcaatctcaccaacaatcagttccaggatgtcttcaatggtcaccagaccggaaaccccaccgaattcgtcaataacgatcgccatgtggtaacgctgagagcgaaactctttcagcatccggtctacgcgcttactttcaggaacgacaaccgcctgacgtaacactttgtccatgctgaaggcttcagcatcgctgcgcataaacggcagcaagtctttcgccatcagaatcccttcaatgtgatctttgtcttcgctaatcaccgggaaacgactgtgggcggactcgatgatgacatcaagacattcgtccagcgtctggttgcgtttcagggtaatcatctgggagcgggggatcatgatgtcgcgaacgcgttggtctgcgatgtccatcaccccttcgagcatatcgcgcgtatcttcgtcgataaggtcgttctgcccggaatcacggatcagcgccagcagttcgtcacggtttttcggttcaccgtggaaaagttggctgagtaacagggagaaaaatcccttcttgttgcttatcgtgtcactactgtgactattgtcgtcgctcatggcgtcgtatgggttctcatgttagttaatcaaaacgccgtcgttaatcaccaacggcggggacgtctgccagtcaaatgcctggcaaattattctttctcggcaatgtacggatcctcatagcccagagcaagcataatctctgtttcgagggcttccatttcttctgcttcgtcatcttcgatgtgatcgtaacctaacaaatgcagactgccgtgcaccaccatatgcgcccagtgcgcctccagtggtttgccttgctcctgagcttccttctcaaccacctgacggcagataaccagatcgcccagtaggctcatttccatgccaggcggcacttcaaacgggaaggagagcacgttggtcggcttatccttaccgcgataggtcagattcagactgtggctttcggcggtatcgaccacgcgaatcgtcacttcgctttcttcctgaaactgcgggatcaccgcattcagccatgtctgaaactggctctcttccggtaacccggaattatcttcacatgccagttgtaaatcgaggatcacctgactcatttttgttcctgttcttcgcgcttgcgttctgctgccagcgccgcttttcgtttttgttcggcttcttcccaggcttcataggcgttaacgatacgcgccaccacagggtgacgaaccacgtcttcgctgtggaagaagttaaagctgatctcttcgacatcggccagcacttcgatggcgtgacgtaagccacttttagtattacgcggcaggtcgatctgtgtgacgtcgccggtgataaccgctttactgttaaaaccgatacgggtcaggaacatcttcatctgttcgatggtggtgttctggctctcatcgagaatgataaacgcgtcgttcagcgtacgaccacgcatataggccagcggtgcgacttcaataacgttgcgctcaatcagtttctcgactttctcaaagcccagcatttcaaacagcgcgtcgtacagcgggcgcagatacgggtctactttctggcttaaatcgccaggcaggaagcccagtttctcaccggcttctactgccggacgagtcagcagaatacggcgaatttcctgacgctccagggcatcaactgccgcagccactgccaggtaggttttacccgtacccgccgggccaacgccgaaggtaatgtcatggtcgagaatattggcgatgtactgcgcctggtttggcgtgcgcggcttaattacgccgcgtttggttttgatattgaccgctttgccgtactccggcacgctctccgcgctttgctccagtacccgcgcttctttaatcgcaaggtggatctgttccggttcgatatcctgaatctgaccgcgcatcggggcagtatcgacatacaggctacgcagaatgtctgccgcagcggtgacgcaaatcggacggccggtcagtttaaagtggttatcgcggcgattgatctcgatgccgagacggcgttcgagctgcttgatgttgtcatcaaacgggccgcacaggctcaacagacgcgcattgtctgctggctccagggtgatttcgcgagtgtctatgttcaaaccgttcctcttatctgtatgccgccggaagctgaacattcaccggcctataaggaaattattcacgccacaggaaaaaggcgcaagcattgcaataaagatggggataaagagagaaaaaacaaggcccaccggaacggcaggcctgagaattacggctgataataacccacgccaaggtcgttttctttgcgggtacgggcaatcacactttccggtgtttctgccacgcgcagacccatttcatcttcagtacgcaccactttaccgcgcagagagttcgggtagacgtcggtaatttctacatcgacgaatttaccgatcatatccggcgtgccttcgaagttgaccacgcggttattttccgtacgcccggaaagctccatgatgctcttacggcttgtaccttctaccagaatacgctgggtggtgccgagcatccggcggctccacgccatcgcttgctgattaatgcgctcttgcagaatatacagacgctgcttcttctcttcttccggaacatcatcaaccatatcggcggctggtgtacccggacgtgcagagaagataaagctgtagctcatgtcgaaattgacgtcggcaatcagcttcatcgttttctcgaagtcttcggtggtttcgccagggaagccaacgatgaaatcagaactgatctgaatatctggacgcgccgcacgcagtttacggatgatcgctttgtactccagcgccgtatgggtacggcccatcaggttcagaatgcgatcggaaccgctctgtaccggcagatgcaggaagctcaccagctccggcgtgtcgcgatacacttcgatgatatcgtcggtgaattcgatcggatggctggtggtaaagcgaatacgatcgatcccgtcgatcgcagcaaccagacgcagcagatcggcaaagcttccggtggtgccgtcgtagttttcaccacgccaggcgttcacgttctgaccgagcaggttgacttcacgcacgccctgagccgcaagctgggcaatctcaaacagaatatcgtcggacggacggcttacctcttcaccacgggtgtaaggcaccacgcagtaggtgcaatatttattgcagccttccatgatggagacaaacgcggtcggcccttcggcgcgcggttccggtagacggtcaaacttctcgatttccgggaagctgatatctacaaccgggctgcggtcgccacgcacggagttgatcatctccggcagacggtgcagcgtttgcggcccaaaaataatatcgacatagtgggcgcgctggcgaatgtgctcgccttcttggcttgccacgcagccaccgacgccgataatcaggtctggattcttctcttttaacagtttccagcgacccaactgatggaagactttttcctgagccttctcgcggatactgcaggtgttcagcagcagcacatccgcttcttccgccacgtcggtcagttgatagccgtgggtggcatccagcagatcggccatcttgctactatcgtactcgttcatctgacagccccaggttttaatatggagttttttggtcatcgacttgctcttgcgaaatagtagccaggaatgcagggcgcatagtgtaatgctttgctgccgttgtgaccagtatgagcgttatcagcccttaggggtaaaaatcctgtaaacttaaagcatattgctaacaggatgattgaccatgacaaatcaaccaacggaaattgccattgtcggcggaggaatggtcggcggcgcactggcgctggggctggcacagcacggatttgcggtaacggtgatcgagcacgcagaaccagcgccgtttgtcgctgatagccaaccggacgtgcggatcagcgcgatcagcgcggctagcgtaagtttgcttaaagggttaggggtctgggatgcagtacaggctatgcgttgccatccttaccgcagactggaaacgtgggagtgggaaacggcgcatgtggtgtttgacgccgctgaacttaagctaccgctgcttggctatatggtggaaaacactgtcctgcaacaggcgttgtggcaggcgctggaagcgcatccgaaagtaacgttacgtgtgccaggcagcctgattgcgctgcatcgccatgatgatcttcaggagctggagctgaaaggcggtgaagtgattcgcgcgaagctggtgattggtgccgacggcgcaaatagccaggtgcggcagatggcgggaattggcgttcatgcatggcagtatgcgcagagctgcatgttgattagcgtccagtgcgagaacgatcccggcgacagcacctggcagcaatttactccggacggaccgcgtgcgtttctgccgttgtttgataactgggcaagcctggtgtggtatgactctccggcgcgtattcgccagttgcagaatatgaatatggcacagctccaggcggaaatcgcgaagcatttcccgagccgtctgggttacgttacaccgcttgccgctggtgcgtttccgctgacgcgtcgccatgcgttgcagtacgtgcagccagggcttgcgctggtgggcgatgccgcgcataccatccatccgctggcggggcagggagtgaatcttggttatcgtgatgtcgatgccctgattgatgttctggtcaacgcccgcagctacggcgaagcgtgggccagttatcctgtcctcaagcgttaccagatgcggcgcatggcggataacttcattatgcaaagcggtatggatctgttttatgccggattcagcaataatctgccaccactgcgttttatgcgtaatctcgggttaatggcggcggagcgtgctggcgtgttgaaacgtcaggcgctgaaatatgcgttagggttgtaaccttacaacattgccggatgcgtgccaaccgtaggtcggataagacgcggcagcgtcgcatccgacattgaaggataagacgtgtcaacatcgcattcgacattgaatgaacgcagaaaagcaaaaagctcgccgaagcgagcttttttaatgtggctggggtacgaggattcgaacctcggaatgccggaatcagaatccggtgccttaccgcttggcgataccccaactgggtgcacttacaaggtaagcgtcttgaataaattggctggggtacgaggattcgaacctcggaatgccggaatcagaatccggtgccttaccgcttggcgataccccaacaaattggttttgaatttgccgaacatattcgatacattcagaatttggtggctacgacgggattcgaacctgtgaccccatcattatgagtgatgtgctctaaccaactgagctacgtagccagattgtttcttcgatggctggggtacctggattcgaaccagggaatgccggtatcaaaaaccggtgccttaccgcttggcgataccccaataaccgggcggtgaaccgcttactcgaagaagatggctggggtacctggattcgaaccagggaatgccggtatcaaaaaccggtgccttaccgcttggcgataccccatccgtacaacgctttctggtgaatggtgcgggaggcgagacttgaactcgcacaccttgcggcgccagaacctaaatctggtgcgtctaccaatttcgccactcccgcaaaaaaagatggtggctacgacgggattcgaacctgtgaccccatcattatgagtgatgtgctctaaccaactgagctacgtagccatcttttttttcgcgataccttatcggcgttgcggggcgcattatgcgtatagagccttgcagcgtcaacctctttttcaaggaaaattgctcgaaagtgactgtttggttaggttgcgaacagcgtggcgctatattcgtcaattattgtttactttgtgttttttcccaccctacagccattcttttgtcatacaggatgaaattcggaatttaacaatagtggtgggaaattaatctatgaaatactggcctacagtgatgagttgtcaaacagtgatgtggcaaacccggaacatttccttactgcatatcagaatcaacaagcacctcaataactgaaacagccccggatttcaccggggctgtttcgcatttcttacttatacgcgctctggtgaacaccaaccgcgcgaccagacggatcgtccattttcttgaacgcttcatcccattcgatcgctttagcggaagaacaagcgacggaaggaccgcccggcacgcactcagcggcgctcggaagcgggaatagttcttcaaagatctcccgatacaagtacgcttctttagaggttggcgtgttgtacgggaagcggaagcgggcagtttccagttgctgatcagaaacctgctgcgcagccacttctttcagggtgtcgatccaactgtaaccgacgccatcggagaactgctctttctgccgccaggccacgcttgcaggcagatacgcttcaaaacattcacgcaggatgtgtttttccattttgccgttaccgcacattttatcctgtgggttaatacgcatcgccacatcaaggaattttttgtcgaggaacggaacgcgtgcttccacgccccaggcactcatcgctttgttggcacgcgcgcagtcatacatatgcagggccagcagtttacgcaccgtctcttcatgcagttctttggcattcggtgctttgtggaagtaaagataaccgccgaacacttcatcagaaccttcaccggacagcaccattttaatgcccatcgccttgatcttacggctcattaaatacatcggtgtactagcgcgaatagtggtcacatcataagtttcgatgtggtaaatcacgtcgcggatggcatccagaccttcctgtacagtgaagtgaatttcgtgatgcaccgtgcccagatggtttgccacttcctgggctgctttcagatccggactacccggcagacctacagcaaaggagtgtaactgcggccaccaggcttcagagcgttcctgatcttccacgcgacgggctgcgtatttcttggtgatagcggaaataatactggaatccagaccaccagaaagcagcacaccgtaaggcacatcagacatcagatggcttttaacactatcttccagtgcctgacgcagctcgtttttgtcggtcacgttatctttcaccgcatcgtagtcgaaccagtcgcgatgatagtaagaacggatttcgccgtcctggctccacaaatagctccccgccgggaactctttaatcgtgcggcaaactggcaccagcgctttcatttcactggccacatacagctgaccgtgttcgtcataccccatatacagtgggatgatccccagatggtcgcgaccaatcaggtaggcatctttttcgctgtcgtacagtgcaaaggcaaacatgccctgcaagtcgtcgagaaattccggccctttttcctgatacagcgcgaggatcacttcacagtcagacccggtctggaactggtaacgatcgccatattcggcgcgcaatgcctggtggttgtagatttcaccgtttaccgccagtacgtgggttttttgttggttgtagagaggttgcgcccccgcgttaacgtcaacaatactcagacgttcgtgggcgagaatggcgttatcgctggcataaataccggaccagtccgggccacgatgacgcatcaggcgactcagctcgagggctttcttacgcagctcaactgcgtctgttttgatatcgaatacgccaaaaatactacacataaccttctccgttaacctggtatttgttgcttgttgtgtttgcttgtttaaaaaaatgccgcaaagcagcactgtgcgcaagcgatttggcggtgaaaaaataaaaaacgtaatggtgattgtcgattggtgaaaaaaggtctggtgtgaggatatatttattgatgaatcgataatttttagcgggttttattgaatgtttatattttacgggggccaaattgctgacaaagtgcgatttgttcatgccggatgcggcgtgaacgccttatccggcctacaaaagcatgaaaattcaatatattgcaggagctgcgtaggcctgataagcgtagcgcatcaggcagtttggcgtttgtcatcagagccaaccacgtccgcagacgtggttgctattcagataacgtcgatttcagcgacactcgggtaaatccagctggggcggaaaggcatactgtcgatatcgtcgaggctgctaacaccagaaagcaccagaatcgtctccagacctgcctggaagccggccagaatatcggtacgcaggttatcgccgacaatcaccgtttcttcgctatgcgcctgcattttgtttaatgctgcgcggatgatccacgggctgggcttaccaacatagaacggtttgcgcccggagattttctcaatccctgcacacaacgcgccacaagcgggataaaaaccgcgcccgtgggtgtccggattggtggcgataaaacgtgcaccgttagcgacgaaataggctgctttatgcatcatgtcccagttgtaggaacgcgtttcgccaacaatcacgaaatcagggttcacatcggtaatagtgaaaccggctttgtacagttcatgaatcagtgcgccttcgcccaccacatacgctttcttgccttcctggcgacgcaggaaatcggcagtcgccatcgcagaggtataaaacacgctgtcaggtacatcgacacctgcggtggcaaagcggttcgccagatcttgcccagtctggctaggatagttggtcagcaacaccagcggcaggcctttatccataatcccgtgcaaaaattccgctgcacccggtacggcgacgttatcgtgcatcagcacgccgtcgatatcgcaaattacatttttaatggtcatggactacccagaatattgacaacaataagcgccactataaaagcacattaattttccagcaaatgctggagcaaaataccgttgagcatggcgcgttttaccagcgcaaaagcgccgattgcgctgcggtgatccagctcagaacgtaccaccggcagattagtgcgaaacgccttcagcgcctgggtattaatgcagctttcaatagcagggagcagcactttatcggcttcggtgatttcaccggcaataacaattttttgcggattaaataagttgatagcaatggcgatggttttacccagatgacgaccgacatactcaattacttcgctcgccagactatcgcctttgttcgcggctttgcagatagttttgatggtgcagtcgtccagcggcacgcggctctggtagccctgctttaacagattcaacacccgttgttcaatggcagcgttggcagcgatagtttccaggcagccaaagttgccgcagtggcagcgttcacccagcggttcgacctgaatatggccaatttcaccgacgttgccgttgcggccaataaaaatgcgcccgttagagataatcccggccccggttccgcgatggacacgcaccagaatggagtcttcgcaatcctgacttgcaccgaagtagtgctccgccagcgccagactacggatatcgtgaccaacgaaacaggtcactttaaaacgttcttccagagcttctaccagcccccagttttctacctgaatatgcggcatgtaatgaattttgccgctgtccgggtcaacaagccctggcaggatcacgctaatcgcgatcagctcgcgcagtttgcgctggtagctatcaataaactgagcaatggcattcaacagggcatgttccagcgtttgctgggtacgttccggcagcgggtaatgttcttctgccagcactttgctgctgagatcaaacagagtgatggtggcgtcatgacgaccaagccgtacgccgattgcgtggaaattgcgggtttcggtgacgatggagatagcgcggcggcccccggtggaggcctgctgatcaacttctttgatcagcccgcgttcgataagctgacgcgtaattttggttacgctggcgggggcaagctggctttgctcggcaatctgaatccggctgattggcccgtactggtcaatcaggcgataaaccgccgcgctgttaagctgttttacgagatcaacattacctatctgagcttgtccgcctggtgtcatactttctcttattgagttacgacctcgttaccgttaacgatggtcttggtgattttaaaatcaggtgtgaatgcagtcaggttggctactttacctgcggcgagtgtgccgagacgtttctcaacgccaatcgcacgcgccggatagagcgtcgccatacgtagcacttcatccagtgcgataccgcaatgttcgaccagattacgcacgccttcaatcatggttaaggaactaccgcttaacgtaccgttctcatccacacaaagtccgttacggtagtatattgttttacccgcaaaaatgaactgttcaatgttggcacctgctggcgcggtggcgtcagtaaccagacacagtttgtcgcctttcagacgtttagcgttgcgaatgttggcgtaatcaacatgcaggccatcagcaataataccgcaataaatgtcagcttcgtcgaggatcgcgcccgccaggccaggttcacgaccggtaatatacggcatcgcgttgtacagatgggtggcaaaggtaatccccgcgcggaaaccggcttttgcttctttcaacgtcgcgttggagtgaccggcagaaaccacaatcccggcatttgccagtttgctgatgacttccgcaggaaccatttccggtgccagggtcactttggtaatgacgtcggcgttttcacacaggaaatcgaccagcgcggcatcaggcttacgcacaaaattcggattatggatgcctttttttaccagattcagccacggaccttccagatgcagacctaacgcctgattcggatgttttgccaggtactcgcgcataacgcgcacgccctgtttcatcagctcatcgctggtggtgataagcgtcggcagatagttagtacagccacttttctcattggctttctgcatgatttccagcgtttccacgctgaccgcttcagcggtgtcgttaaactgtacgccgccgcagccgtttaactgcacatcgataaaaccgggggagagaatggccccgttcagactacgttgttcgatctctggcggcagttccgctaccggacagacgcttttaatcaggccatcagcgataacaaccgcgtggtcatcaagaaattcgtggccggtaaagatccggccctgggttaatgcatacattctgacccccgattttaaaaaatattgccctgagcaaggagccagggcagggataacaattacagacctttgatattttctgcttctaattcattgaaatatcttaaagtcttaactttcagctccatggtggaaggttcatcgcacaccatgatcgctttcggatgcagttgcagacagctgatggtccacatatggttcacgcaaccttcaacggcggcctgcagcgccagtgctttctggctacccagcaccagaatcatcacttcttcggcatccagcagtgtaccaacaccgacagtcagggcatattttggcacctgattaacatcgttatcaaagaaacgagagtttgcgacgcgagtgtcatgagtcagggttttgatacgagtacgagaagccagagaagacgccggttcgttaaatgcaatatgaccgtcgttacctacaccgcccataaacagatgaatttttccgtaagaacggattttttcttcatactggcggcactcggcgtcgatatccggggcgttgccgttgagaaggttgatgttttctgctggaatatcaacgtgatcgaagaaattacggtgcataaagctgtagtagctttccggatgctctttcggcagaccgacatattcgtccatgttgaaggtgacaacgtgcttaaagctgacctggcctgctttatgcatttcgactaacgctttataggtggtcatcggcgtgccgccagtcggcaggcccagtacaaacggacgatcggcagtcggtttgaacgcattgatacgattgacgatatggcgagcagcccatttgccgacctgttcagcggtagtcagggggatcagtctcattattcacctcaataagtaaaatgtaagccgttggcggattaggcatctttaagcgtaacctggatttgcgcagacaggcgtcaatccgacctgattttttgaatgataaaataagttttctggtttagccagtaaaagggagtgataataacgatatttggtgacaaaactcacaaaagacacgcgtttaatttgcgatacgaattaaattttcacacactctgtagcagatgatctaacaatctgattacagaacatcggcagtacaatttgcagcaaaataaaaatacggcttgaaacgagccaaatagggttctcgtagggggaataagatgaatattttaggttttttccagcgactcggtagggcgttacagctccctatcgcggtgctgccggtggcggcactgttgctgcgattcggtcagccagatttacttaacgttgcgtttattgcccaggcgggcggtgcgatttttgataacctcgcattaatcttcgccatcggtgtggcatccagctggagcaaagacagcgctggtgcggcggcgctggcgggtgcggtaggttactttgtgttaaccaaagcgatggtgaccatcaacccagaaattaacatgggtgtactggcgggtatcattaccggtctggttggtggcgcagcctataaccgttggtccgatattaaactgccggacttcctgagcttcttcggcggcaaacgctttgtgccgattgccaccggattcttctgcctggtgctggcggccatttttggttacgtctggccgccggtacagcacgctatccatgcaggcggcgagtggatcgtttctgcgggcgcgctgggttccggtatctttggtttcatcaaccgtctgctgatcccaaccggtctgcatcaggtactgaacaccatcgcctggttccagattggtgaattcaccaacgcggcgggtacggttttccacggtgacattaaccgcttctatgccggtgacggcaccgcggggatgttcatgtccggcttcttcccgatcatgatgttcggtctgccgggtgcggcgctggcgatgtacttcgcagcaccgaaagagcgtcgtccgatggttggcggtatgctgctttctgttgctgttactgcgttcctgaccggtgtgactgagccgctggaattcctgttcatgttccttgctccgctgctgtacctcctgcacgcactgctgaccggtatcagcctgtttgtggcaacgctgctgggtatccacgcgggcttctctttctctgcgggggctatcgactacgcgttgatgtataacctgccggccgccagccagaacgtctggatgctgctggtgatgggcgttatcttcttcgctatctacttcgtggtgttcagtttggttatccgcatgttcaacctgaaaacgccgggtcgtgaagataaagaagacgagatcgttactgaagaagccaacagcaacactgaagaaggtctgactcaactggcaaccaactatattgctgcggttggcggcactgacaacctgaaagcgattgacgcctgtatcacccgtctgcgccttacagtggctgactctgcccgcgttaacgatacgatgtgtaaacgtctgggtgcttctggggtagtgaaactgaacaaacagactattcaggtgattgttggcgcgaaagcagaatccatcggcgatgcgatgaagaaagtcgttgcccgtggtccggtagccgctgcgagtgctgaagcaactccggcaactgccgcgcctgtagcaaaaccgcaggctgtaccaaacgcggtatctatcgcggagctggtaagcccgattaccggtgatgtcgtggcactggatcaggttcctgacgaagcattcgccagcaaagcggtgggtgacggtgtggcggtgaaaccgacagataaaatcgtcgtaagtccagccgcagggacaatcgtgaaaatcttcaacaccaaccacgcgttctgcctggaaaccgaaaaaggcgcggagatcgtcgtccatatgggtatcgacaccgtagcgctggaaggtaaaggctttaaacgtctggtggaagagggtgcgcaggtaagcgcagggcaaccgattctggaaatggatctggattacctgaacgctaacgcccgcagcatgattagcccggtggtttgcagcaatatcgacgatttcagtggcttgatcattaaagctcagggccatattgtggcgggtcaaacaccgctgtatgaaatcaaaaagtaatctgctttatgcctgatgcgacgcttgagcgtcgcatccaacaatgacaagcggtggagatcttctctgccgctttttttttcatcaatcatccccataatccttgttagattatcaattttaaaaaactaacagttgtcagcctgtcccgcttataagatcatacgccgttatacgttgtttacgctttgaggaatccacgatgagtgaggcagaagcccgcccgactaactttatccgtcagatcatcgatgaagatctggccagtggtaagcacaccacagtacacacccgtttcccgccggagccgaatggctatctgcatattggccatgcgaaatctatctgcctgaacttcgggatcgcccaggactataaaggccagtgcaacctgcgtttcgacgacactaacccggtaaaagaagatatcgagtatgttgagagcatcaaaaacgacgtagagtggttaggttttcactggtctggtaacgtccgttactcctccgattattttgatcagctccacgcctatgcgatcgaactgatcaataaaggcctggcgtacgttgatgaactgacgccggaacagatccgcgaataccgcggcaccctgacgcaaccgggtaaaaacagcccgtaccgcgaccgcagcgttgaagagaacctggcgctgttcgaaaaaatgcgtgccggtggttttgaagaaggtaaagcctgcctgcgtgcgaaaatcgacatggctagtccgtttatcgtgatgcgcgatccggtgctgtaccgtattaaatttgctgaacaccaccagactggcaacaagtggtgcatctacccgatgtacgacttcacccactgcatcagcgatgccctggaaggtattacgcactctctgtgtacgcttgagttccaggacaaccgtcgtctgtacgactgggtactggacaacatcacgattcctgttcacccgcgccagtatgagttcagccgcctgaatctggaatacaccgtgatgtccaagcgtaagttgaacctgctggtgaccgacaagcacgttgaaggctgggatgacccgcgtatgccgaccatttccggtctgcgtcgtcgtggttacactgcggcttctattcgtgagttctgcaaacgcatcggcgtgaccaagcaggacaacaccattgagatggcgagcctggaatcctgcatccgtgaagatctcaacgaaaatgcgccgcgcgcaatggcggttatcgatccggtgaaactggttatcgaaaactatcagggcgaaggcgaaatggttaccatgccgaaccatccgaacaaaccggaaatgggcagccgtcaggtgccgtttagcggtgagatttggattgatcgcgccgatttccgcgaagaagctaacaagcagtacaaacgtctggtgctgggtaaagaagtgcgtctgcgtaatgcttatgtgattaaggcagaacgcgtcgagaaagatgccgaaggtaatatcaccaccatcttctgtacttatgacgccgataccttaagcaaagatccggcagatggtcgtaaagtcaaaggtgttattcactgggtgagcgcggcacatgcgctgccggttgaaatccgtttgtatgaccgtctgttcagcgtgcctaacccaggtgctgcggatgatttcctgagcgtgattaacccggaaagcctggtgatcaaacagggctttgctgaaccgagcctgaaagatgcggttgcgggtaaagcattccagtttgagcgtgaaggttacttctgcctcgatagccgccattctacggcggaaaaaccggtatttaaccgcaccgttgggctgcgtgatacctgggcgaaagtaggcgagtaattttaagtttcgctatgccggatggggcgtttacgtcgcatccggcaaggaacagacaaacagtttcaaacgctaaattgcctgatgcgctacgcttatcaggcctacatgatctctgcaatatattgagtttgcgtgcttttgtaggccggataaggcgttcacgccgcatccggcaagaaacagcaaacaatccaaaacgccgcgttcagcggcgttttttctgcttttcttcgcgaattaattccgcttcgcaatttatccataaaataaatttaaaataacaaaacataattaaataaaatgtaaccgctttcatcttgctggaatttcacgcttttattcttctgcaagcctttcaaccgcaaacttaagccttgtaacaaaaatcatcaaaatatgtgcggttgctcatgttcttacattctggttacagaaagagattgataattcgcgtcgcgaaaaatagtctgttcctgtagtcagcgagacttttctcaacgctacttttttaatttttattttttcgctgttcacctttggtgcagcaatttatacgtcaaagaggattaacccatgcgtacgtttagtggcaaacgtagtacgctggcgctggctatcgccggtgttacagcaatgagcggctttatggcaatgccggaggctcgcgccgaaggattcatcgacgatagtaccttaaccggcggtatctattactggcagcgtgaacgcgaccgtaaagatgttaccgacggcgacaaatacaaaaccaacctttctcactccacctggaatgccaacctcgattttcagtccggttatgctgctgatatgttcggccttgatattgctgcgtttacggcgattgaaatggcggaaaacggcgacagctcccacccgaacgaaatcgcgtttagtaaaagtaataaagcctatgacgaagactggtccggcgacaaaagcggtataagcctgtataaagctgcggccaaatttaaatacggtccggtttgggcgagggcaggttacattcagccaactggtcaaacgctgttagcgccgcactggagctttatgccaggtacttatcagggggcggaagccggggcgaattttgattacggcgatgctggtgcgttgagtttctcctacatgtggaccaacgaatacaaagcgccgtggcatctggaaatggatgagttttatcagaacgataaaaccaccaaagttgattatctgcactcctttggggcgaaatacgacttcaaaaataacttcgtactggaagcggcatttggtcaggcggaagggtatatcgatcaatattttgccaaagccagctacaaatttgatatcgccggtagcccgttaaccaccagctaccagttctacggtacccgagataaagttgacgatcgcagcgtcaacgacctttatgacggcaccgcctggctgcaagcgttgacctttggttaccgggcggctgacgtagtggatttgcgcctcgaaggcacctgggttaaggctgacggtcagcagggatacttcctgcaacgtatgactccaacctacgcttccagtaacggtcgcctggatatctggtgggataaccgttctgacttcaacgccaacggcgaaaaagcggtcttcttcggtgcgatgtatgacctgaaaaactggaatcttccaggcttcgccatcggcgcttcctacgtttacgcatgggatgctaaacctgcgacctggcagagcaatccggatgcgtactacgacaaaaaccggactattgaagagtctgcctacagcctggatgcggtctataccattcaggacggtcgcgccaaaggcacgatgttcaaactgcatttcaccgaatacgacaaccactccgacatcccaagctggggcggtggttacggcaacatcttccaggatgagcgtgacgtgaaatttatggtaatcgcaccattcaccatcttctgatgcccgacgcggcaggttttgtgcctgccgcacgtttgaggaatttgctatgaaaaaactgattctcatcgccataatggcaagcgggctggtagcttgtgcgcaaagtaccgcgccacaggaagacagtcgtctgaaagaggcatacagcgcctgtatcaacaccgcacaaggtagcccagaaaaaattgaagcctgccagagcgtgttaaacgtgctgaagaaagagaaacaacatcagcagtttgccgaccaggaaagtgtacgcgtactggattatcagcagtgtctgcgtgcaacgcaaaccggaaatgatcaggcggtgaaagccgattgtgataaagtctggcaggaaatacgcagtaataacaaataagtgagagctgtaactctcgcttttcttatttcccttgcataaaaaagccaacccgcaggttggcttttctcgttcaggctggcttatttgccttcgtgcgcatgttcatcttcgcggcaatcgccttcggcacagtgaccgtaaagatagagactgtggttagtcaggcgaatgccatgttttgcggcaatttcacgctgacgcgcttcgatggaatcatcactaaattcgataaccttgccgcagtcgaggcagatcaggtgatcgtggtgatgttgctgtgtcagttcaaatacggatttaccgccttcaaaattgtggcgggtgacgataccagcgtcgtcaaactggttcagtacgcgatataccgtagccagaccaatttcttcacccatatcgatcagacgtttgtataaatcttccgcactgacgtgatggttgtccggctcctgaagaacttccaggatttttaaacgaggaagcgttactttcaggccagctttctttagggcggtattgttatcagtcatgcggaatctgtcctgttactaagcggttcacttcattagaagaagtgacagaatttgctcttgagataatgcgtatcattatagaattgccacgcctaaatgaaaaccacaagtccctggcaaatattgttaataaaaacgtggcacagcttacatttacaacggcaaggccacttgaacaccgggacattgtacaggtacaacagcaaaagttacaaatttgtagcaattattttgattggcattatctattaatacggcgtagacatgagtctacgccgcatcacatcaggcattgagaatttcgtcgagatgcaactcttcagaaatctgtttaacccatttttctacacgttcagcggtcagttccggctgacggtcttcgtcgatagccagaccgacaaagtggtcgtcatctgccagacctttacttgcttcgaaatgatagcccgcagttggccagtgaccaacgatggttgcaccgcgcggttcaatgatgtcgcggatggtgcccaatgcgtcgcagaaatattcggcgtaatcttcctggtcaccacaaccaaacagcgcaaccagtttgccgttgaaatcaatctcttcgagagtcgggaagaagtcatcccagtcacactgcgcttcgccgtaataccaggttgggatgcccagcagcagaatgtcataagcttccagatcttctttgctgctttttgcaatgtcatggacatcggcaacgtctttaccaagctgtttttgaatcatttttgcgatattttcggtattaccggtgtcgctgccgaaaaagatgccagtgatagccatgagtgaaataacctcttgaaacttattgaaatgggggtggaaaattgcccacggataaaggcaatcatagcagaacaggcagtcttgcggaatcagcaaacgagcaggactgcacactgtgctacatgaaagtggaaatttaaacgatgccctgactacgcagcgccgccagttgctgcattaacatctcttcgatcagttcgctacggctcatattgcggctctccgccagctcgttcagcgcctcgacagcttccgcgttcagcttcagttcgacacgcttaaggccacgtactttgtcgcgttttagctggttgcgtttattaatacgcagctgttcatcgcggctaagcggattagttttcggtcgtcccggtcgacgctcgtgcgcgaacagatctaatgtcgtacggtccgtttgttctttggccatgatcttggtgacttcgggggaaacaatcagccaggcctctgcccggatggatagcgcgccataatacatcagcgcgatgagtcacgccaacgcccacgcgcggaaagcgacgcggacgctgggtttttaatcagttgcgttaatcattgagatagcgacggatagcgcgtaataccgcatccggtttttcagcatggacccagtgacccgcgcctgcaatcacatgcgcccgtgcctgtggaaattgagccagtaaatcatcacggtactgctcgctaacatacggagaattgccgccagggataaacagggcagggtgatcccatgccgggattttctcccaacctacaatatgcggatactgatcccacaataccggcacgttaaagcgccactccccgtcaacaaaagatttcagcagaaactgaatcaccccttcttcattaagatgctggcgcattattgctgctgcttgctggcgagtttgtgcgtcgctttcactgaccgcgttgatagccgcaaaaatctcatcatgacggcgtacgtgatagtcgaccggcgcgatatcgatcgccaccagtttatcgatgcgatcggaggctagtgcagtaagtgccattaccgctttaccgcccatggagtgaccgataaatgttgctttgtcgatctgctgtgcatccagagtatcaacaagatcctgcgccatcgccgggtaattcattaccggatctctcggactaagaccgtggttacgcatatcaacctggatgatattgtgatcgtttaccagatcgcgagccagtacgccaaggttgtcgaggctgccaaacagaccgtggacaagaacgatgggagaattattgtgctggttttgtgcagtttgcgcgcggatattcaatttcatggcaaagttctttttttcgcgttgtcgggttagggtattatgttgaccattgtgccacagggctgcaacaaataaggtttattccgagtttttctgcaagccaggcttgacgctatccgctgccgggatttattcatatactcctggcgacttgtattcagctaagacactgcactggattaagatgaaaacgattgaagttgatgatgaactctacagctatattgccagccacactaagcatatcggcgagagcgcatccgacattttacggcgtatgttgaaattttccgccgcaagtcagcctgctgctccggtgacgaaagaggttcgcgttgcgagtcctgctatcgtcgaagcgaagccggtcaaaacgattaaagacaaggttcgcgcaatgcgtgaacttctgcttagcgatgaatacgcagagcaaaagcgagcggtcaatcgctttatgctgctgttgtctacactatattctcttgacgcccaggcgtttgccgaagcaacggaaagcttgcacggtcgtacacgcgtttactttgcggcagatgaacaaacgctgctgaaaaatggtaatcagaccaagccgaaacatgtgccaggcacgccgtattgggtgatcaccaacaccaacaccggccgtaaatgcagcatgatcgaacacatcatgcagagcatgcaattcccggcggaattgattgagaaggtttgcggaactatctaaaacgttgcagacaaaggacaaagcaatggcaatccacaatcgtgcaggccaacctgcacaacagagtgatttgattaacgtcgcccaactgacggcgcaatattatgtactgaaaccagaagcagggaatgcggagcacgcggtgaaattcggtacttccggtcaccgtggcagtgcagcgcgccacagctttaacgagccgcacattctggcgatcgctcaggcaattgctgaagaacgtgcgaaaaacggcatcactggcccttgctatgtgggtaaagatactcacgccctgtccgaacctgcattcatttccgttctggaagtgctggcagcgaacggcgttgatgtcattgtgcaggaaaacaatggcttcaccccgacgcctgccgtttccaatgccatcctggttcacaataaaaaaggtggcccgctggcagacggtatcgtgattacaccgtcccataacccgccggaagatggtggaatcaaatacaatccgccaaatggtggcccggctgataccaacgtcactaaagtggtggaagacagggccaacgcactgctggccgatggcctgaaaggcgtgaagcgtatctccctcgacgaagcgatggcatccggtcatgtgaaagagcaggatctggtgcagccgttcgtggaaggtctggccgatatcgttgatatggccgcgattcagaaagcgggcctgacgctgggcgttgatccgctgggcggttccggtatcgaatactggaagcgtattggcgagtattacaacctcaacctgactatcgttaacgatcaggtcgatcaaaccttccgctttatgcaccttgataaagacggcgcgatccgtatggactgctcctccgagtgtgcgatggcgggcctgctggcactgcgtgataagttcgatctggcgtttgctaacgacccggattatgaccgtcacggtatcgtcactccggcaggtttgatgaatccgaaccactacctggcggtggcaatcaattacctgttccagcatcgtccgcagtggggcaaagatgttgccgtcggtaaaacgctggttagttctgcgatgatcgaccgtgtggtcaacgacttgggccgtaaactggtagaagtcccggtaggtttcaaatggtttgtcgatggtctgttcgacggcagcttcggctttggcggcgaagagagtgcaggggcttccttcctgcgtttcgacggcacgccgtggtccaccgacaaagacggcatcatcatgtgtctgctggcggcggaaatcaccgctgtcaccggtaagaacccgcaggaacactacaacgaactggcaaaacgctttggtgcgccgagctacaaccgtttgcaggcagctgcgacttccgcacaaaaagcggcgctgtctaagctgtctccggaaatggtgagcgccagcaccctggcaggtgacccgatcaccgcgcgcctgactgctgctccgggcaacggtgcttctattggcggtctgaaagtgatgactgacaacggctggttcgccgcgcgtccgagtggcacggaagacgcatataagatctactgcgaaagcttcctcggtgaagaacatcgcaagcagattgagaaagaagcggttgagattgttagcgaagttctgaaaaacgcgtaaacacatttaataaaaaaagggcggtcgcaagatcgcccttttttacgtatgacaaacacagaattgcctgatgcgctacgcttatcaggcctacgaggatggtgcaatatattgaatttaagcgattttgtaggccggataaggcgttcacgccgcatccggcaaaaacaacgaacactttgtcaacaaactgagtagctcaaggaaatcccaatgaagaccaacaggagtctggtcgtcatagtgagtctaattaccgccacattactgctgactgcatgcgcccaacctgaacaaagtagtttagctggcgactggttactgacccctaaagataaaaccagaggattaacgggtagcattgcggtaaatattgcacctttccggtgtaagacaaattgccgtggtgataacttacctgataatacccgccgctggcagttgagtggcgggaacgaaaaagaacttacttatcttcataatatgagtgcacaagaaaaggtcggtttaaatcccggttggcaatgctacaccagtttttttatgcgggtttgccagggcaagcccggcactcgaccgatagtcaatgaggattatgtcagcgaaagcggattttttggcagcatgatgcatgtcgggattattgagttacgacgctgccagagtgaaaattgccagcaagaattgaaagcgataaatacacattaaaatagtgagtccgggaatgaaacccggacctgaacatgtcttattgcgtgaatgtttctttcatttgatactgcatttcccagagttcagtaaggctaataacttttcttgttcttgcttcttcactttgtacccataagaaagggtagaacgtgaaggcttccgttgcgcttaattttattacgtcttctcgccattgctgccatcgtacattttcatagaaggtatctaaatcaccggataatgcccactgaagaaactcagaatatccaacttccagactttcccaattcagcgtatctggcgcaaaataataaacgcagccagtatcttccccaagatcgccaccattaagagcaaaaattacccctgcgacatcgtcagcgatgggtaaagcccgcacgcctgcgaattcagggcgttgtgtccaacttactggatctcgtggcaaccgggggtgaccagatcctgctatgcgtaattaaccattatcaatcagcagacctccggagccatagacaagcgcacccatcggactttttgttgtcacctgtaattgataaagtgcggtttcggctaaatctttattaaccggtaagagttcggtatggtttgtggcgtcttttaaccagttctggattattggccaggcactatcttcagtatttactaactgattcatttcacgcatcgctacttgctccttgtgtgctacggtgtcatttatgatgaggaattgtatggaacattttttaaatattaagttccttatatttgaataaaaaatgactttatccatacattgccacttttttcaaagcataaaccgatacccaataccggtttcagtaataaaatggcgaggccgggccggatcctgttccagtttttgtcgcagatgccccatataattacgcaaatagttgctgtgttcgatcgcgtttagaccctacatctgccggatgcggcataaataacgaactatttgccaacaaacagaaagggcgatcattcaatcgcccttttttactttgttttattaaccgtgtttatttttcagttcaaagcgtggacttaccagaccatacagtgtccaaccaaggaaggtcacgatggaaccgtacagcatggcttcttccccggaactgtacagcgcataaaagctatacatcgcgccaacaaaagcaacaaagtttgcaactttcgctttactggggggcacattagcgaccttctgaataatgactaatgccgccatactcagaatatacggaatgatattggtcaccacggccaggttaaccagcacgttgaactgactgtttaggctcgggctaatggtcatcagtgccaatccactctgaataatcacaatggtcaacattccctgcaccggtgcatccactttggttacacgggagaaaattttagggaagtagccttcatcagaactagatttaaacacctgggcaatggtgaactgccagccaagtaggctaccgcagcaggacatcaccatcagcgccataatgactttacccacttccggcgtgaacatctgcgcgaaggccagaccaaatggtgccgtactatttgccagctccatatttggcacaatcccggcaatcacgttggtggagacgatataaatcaccgccgcacctaacgtaccgccgagtaccgcgattggcacattacgttccgggttttccactacatcagtattcgcacacgcagactccagaccaagaaaagcccacagcgtcatagcgatggaagaacctaccgcactgaagaacggtgcatgatgcggattccaggaatcaacgtacagcgtcgggctaaaccagaaccagccaataatgcacagaccgacgaccggaataatgaccccccacacggtaatgctactgatttgcccggtaatgcgcgcaccaccaaagttagccacggtacaaatccacagcaccccgatggtcgcaagaccaatctgcactgggctcaaactcgcgccgagcagttcggtgccgtaaccaaccgcgctaatagcaatcgcgacgttagcaatcagcagactgacgccgtaggtatagttcgccataaagttaccggatttaccgaaagcatactcggcataaccgcccataccgccacttttacggctgaacataccgcattttgcgaatgcccatgccagtgccatactgcctacggctgtcaccagccaggagataatactgattgtcccgacttcggcaagctttgtcggcagcatgatgataccggagcccatcatgttgaccatcgtcagtatggttaactgaacgacgcccattttgttgcttttagcctgactcataatttttcccctttcaacagggtgctttgcgcatcacgaggcttgatgacatagcaccaaacttgcttacgaccatcatgttcttcgatatagacaccctgcagctccggtgcaaaacctggcagcaggttgatcccttcttccagagcgctgaagtaacgcagaacagcaccaccccagatttcacccggaacaacacacagcacacccggaggataaggaagcgcaccttcggcagcgatacggccttctgcatccggcagacgaaccagttccacttcaccgcgtaaataggcgtagttggcttcttgcggattcatgctgacgcgtgggaagtgctccttacggaacatctctttttgcagttgtttcacgttgtggcgggcatacaaatcatgcatttcctgacacaactgacgcagggtataaccggcgtagcgctcttcatgctgtttgtagatggaaggtagcacttctgctaatggcgcgtcggactcaagcagtttttcgaagcgtaccagcagggcaacaagttgctgaagtttggccatatcttctgccggagtcagcaggaagaggatggagttaagatcgcatttttccggcactacgccattttcgcgcaggaagttagcaagaatcgtcgcgggtacaccgaacgcttcatattcgccgttacgtgcatcaatacctggggttgtcagcaacagtttgcatggatcgacaaagtattgattctctgcatagccttcaaaagaatgccagtgttcccctggtacaaactggaagaagcgcagatcaaccgcaatttgcgctgtttcatagctctgccagggtttaccatccaccagttcaggtacgaacggacgaatatgctgacagttatcgaggatcagtttgcgggcattaatgccatttaccacacaatccatccacatattacgaccgctgacaccttcatgcattttggcgttgatattcagtgcggcaaacagcggatagaacgggctggtggaggcgtgcatcataaaggcgttgttcatgcgtttgtgcggtacataacgctgttgccctttgatgtggctgtcttttttatgaatttgactagtctgagaaaaaccagcctgttgtttatgcacagattgcgtaaccagaatacccggatcgttctcattaagatccagcaacagcgggctacagtccgccatcatcggaataaactgttcatagccgacccatgcactgtcaaacaggatgtagtcacacagatgaccaattttatccaccacttggcgggcgttataaatcgtaccgtcgtaggtgcctaactgaatcacagcgaggcggaaaggacgagcctcttttgcccgctgcggtgcgacttccgcgatcagctcacgcaggtaactttcttcaaaacagtgcgcatcaatgccaccgataaagccatacgggttacgtgccgtttccagataaaccggtgttgcaccagcctgtagcaacgctccgtggtggttagatttgtggttattgcgatcaaacagcaccagatcacccggtgttagcagggcgtttaaaaccactttgttagaagaactagtgccatttaaaacgaagtaggttttatcggcattaaacacttttgccgcatgttgctgtgcaatgcatggcgcgccttcgtgaatcagcagatcgcccatcgctacgtcggcgttgcacaagtcggcacggaacagcgcctcaccaaagtattccacaaactgattccccgccggatggcgacggaaaaattcgccgccctgatgaccagggcaatcaaacgcgctgttaccttgattgacataatcgaccagtgcgcggaagaaaggtgggcgcagttgagtttcataatggctggcagcggtttctaactggcgaccataaaattctcgtcggctttcgcaattctcaaagacaccgctaatacggggcaaatactctgcgggtacacgttcttgattttcagtagcaataaataccgggatgccataacccgtggcatcgatttcatcgagttttccgcatgtaacatcgttgaggcttaaaactattgccgccacatcgatattacgactttcattaatgtagatacattctcgctgcgtggtaaaacagtccgggcaagaatcactaaccgcaatttttaatttactcatttttcatctctttattttaggtaatagcaggtcctcaatttctcgaatgagaaatcgatcgtgccggaaaaaagcaaagttaccccgctgataaataaatcaggtagattgcttttttcagaatgcagaaacccttaccagtcaggtggctgataatacaagggttaacagagaatgagcactgcggaatacaggcatatgcctgtaatacagagagtcaggaagacctgtacgctgaagtgcccttagtcggtagactaacgggcattgaagaagtgaaagtcgaagctattgcgatgagcaaacttcataatatgagttgtccgccttatatggggcatagtgcggctgttattttccatttaatttacctttcctgatgtgaatgaaggtgaagatattctatccaggaaatacggttgaactgtgaaggtgatcaataaaaaatgatcaatcttaatttatttaatgatgagctttttactcagtaatataaaatattgaattgttatttttgtgtgttgtttaagataaaaagccgtatttattattacggctttaattaataaaaggcaggctgtattaaaattaatattcaaagcataaaccgatagccaataccggtttcagtaatgaaatggcgtgggcgggcgggatcctgttccagtttttgtcgcagatgtcccatataaatacgcaaatagtgactgtgttcgaccgcgtttggcccccacacctggttaaggagctggcgctgggtgagtacttttccggcattgttgagcagcaccgccagcaggcggaactcaattggtgtgagatgcacctcttcctcaccccggtgaatcacgcgggcggctaaatcgacggtaacatcggaaaattttaccagcggatcgggcgcggtggtggcagagtggcggcgtaatgcgacgcgcagacgggcctgcaattcgccaatgccaaacggcttactcagataatcatccgctccggcatccagcgcggcgattttgtcgctctcttcgctgcgtgcggaaagcacaatcaccggcaccgcgctccactggcgcaggtcgcggataaactcaatcccatcaccatcgggcaggccgagatcgagaataatcaaatctggcttacgggttgccgcttccagcaagccgcgttgcagcgtttcggcctcaaagacgcgcatcccgtcgccctccagcgccgtgcgcagaaagcgacgaatagcctgttcatcttcaacaatcagaacgtttgtcacatatcctcatgaaattcttcaagttcaggggcagtttgctggggaagtgtaacacgaaaacaggcaccaccttccggtcggttgaacgcggtaatagtgcccccgtgtacatccactatcgcccgacaaattgccagtccaagccctacccccggtactgcgctctctttattcccgcgagcaaacttatcaaatatcgtctgctcctggcctggcggaagaccggggccgttatcccagacatccagttgtagattttcgccctcaacgtgggcatcgataccaatttcggcctgcgcacccgcatatttcaccgcgttctccagcagattaatcagcacccgttcaaagagtggcccgtcaacgtggattaaggtcagcggttctggcagagaaagattgatggggctgcttaaacccggttccagcatttgcagcgcgctgccgactacttcttccagcgttaaccactctttcttcaaattaaagccgccggactgaattcgcgccatatccagtagattattcaccagtcgggtagtgttcagcacatgctgacggatctcgctggcctggcgggcgtggggacttccttcgcttgccagatcgagcgttaagatttctgcctgaccaaacagcaccgtaagcggcgtgcgtaaatcatggctaagcgccgccagcagggcgttgcggatctgttcacgttcgcttgccatccgcgcctgttcttcgctggcggttagcgtcagccgctcaagggcattggcgactaacagcgtaaacgtctccagcaggcgctgctgttccgggatcatcaactggcgcagattccccggctccaccaccaccagcccgtaggttttctcgccgctttttagcggcaaaatctggtacggtacaccgggtaacgtgtcggtgcccgcgcccgcaggcaggcctttatcaaaactccactgcgcgatggcatcgtcccacggcgtcattccttgcggatgtgttaacggctgcaatttaccgttgtcatcgggcaacaacacctgactgcgggcatgaaacgtggaggcaataaattgttcgctggtggcagcgatatcctgcggactgcggcccaccgccagagctttgctcatttcatataagtgccgtgtgcgttgctcgcggtaacgggctacccgcgcctgataacgcacgccagcagtaaggttcccgatcaccagcccgacggttaacatcaccgcgaaggtcagcagatattacacatcagagacggcgagcgtgccgcgtggggcgataaaaaagagatcgaaactcactacattaatgacggtggcaaccacactaggccagcgtccataaaatagcgccaccaccaccacgccaagcagatacagcatcaccaggttggcggcatcaaacgccatcagccactgcatggcaattaaggtgataacggcgcataacgcggcggcaaccacgcatccctgaatttgtacacgccacttgtctttaaaagagcggttatccggcgcgttgttaatcgtgcgggcgggtggttcatcaagcgcgaccagcacctgatcgagatcgggggcgatgcgcgccagtcggtcagcaaacgtttcccgacgccaccagcggcggctggccgggcgaccgagaataatcttgccgagattatgttcacgggcataacgcactaccgctttctcttccgctggatcagaaagtgttgccgtctccgcgcccagttcctgcgccagacgtaaggcgctgagaattgcccgacgttttttttccggtaagcggtgcagggcaggggtttcaacatacaccgcgtgccagacgctacccagccgactcgccagccgcgccgctgcgcggaccagtttttcgctgccggtgttatggccgatgcataaaaggatcgcgtcgcgcgtgcgccacactttctcttcgccaggatgcccccgccaggcgcgcatttgctcatcaacgcgatcggcagtacggcgcagtgccagttcgcgcagggcgatcagattacctttgcggaaaaaatgttcaatggcgcgctccgcctgcccggcaatatagactttgccttctttcagccgctggcgcagatcgtccgggggcaagtccaccagcaccacgtcgtcggcggcatcgaaaaaaggatcgggcacggtttcccgtacctgaattccggtgacgccgctgaccacatcattcagactttccagatgctgaacgttgacggtagtgaaaacatcaatgccagcttccagcagttcttcgatatcctgccagcgtttgggatgacgggaacctggcgcattactgtgcgccagttcgtccattaagatcagcgccgggcggcgggcgagggcggcatcgagatcaaactcgctgatatgccgcccacggtacgcctggcgttttaacggcagaacagccagcccttccagcatggcggcggtatcttttcgcccgtgggtttctaccacgccaaccacaatatccagcccttgcgcccgcagtcgctgggcttctgccagcatcgcccaggtcttcccgacgcctgcacaggcaccgaagaaaactttcagcttcccccgatgcggcgcggcagtttgttccagcagacgatcggggtcgggacgtaagggttcgttattcatcaagtttatccagcgccagattgagttcaacaatgttgacaaccggctggccgatatatttcaccagcggttgttggctgtattttgcgatcagttgcgtgagctgttcaacgctgagattacgcgctttcgccacgcgtgggatttgccaggccgccgcttgcggggtgatattattgtccagcccgcttgcgcttgccgtcaccagttcaaccggaacgctcgcgctggcatccgggttagcggcccgtaatgcagcaacgcgtgcggctattagtttatccagctcagggttactgaccgccagattgctcccgccagaagcctgtggattatagggcatttctgccgttgcgctcgggcgaccatgaaaatagccgttgccggtaaaattctgcccgattaatgcgctaccgcgcaccgtatcaccttcacgaatcaagctaccattggcctgccagggaaaccaccattgccccagtacggtggtcagcagcgggtaaacgccgccagtaatcaataacagaaagataaatgtacttaatgccggacgtaatccactcatggtaaacctcacaccagaccgcaaacggtcagcagtaaatcaatgactttgataccgataaacggcaccagcagcccacccagaccgtaaatccataagttacggcgcaacatggcagaagcggtaagcggtttataactcacgccttttaacgccaggggaatcaaaaagacgataatcaaggcgttgaaaatcaccgcactgaggattgcggagtcggggctatgcaggcacatgatgttcagcgcatttaactgcggatacgttgccgcgaatgccgccggaataatggcgaagtatttcgccacatcgttggcaatgctgaaggtggtcaggctgccacgggtcatcagcatctgtttgccaatgtgcaccacctcgatcaacttggtcgggttagagtcgagatcgaccatattgcccgcctctttcgccgcctgggtgccggagttcatcgccaccgcgacatctgcctgcgccagcgccggagcatcgttggtgccgtcgccggtcatcgctaccaaacgaccttccgcctgatactgacggatcaatgccagcttggcctccggtgtcgcttcggcgagaaaatcatcgacacccgcttccgcagcaatcgcggcggcagtcagacggttatcgccggtaatcatcaccgttttaatgcccattttgcgcagctgggcgaagcgctctttaataccgcctttgacgatatctttcagcgcaataacgcccagcacacgagaaccttccaccaccaccagcggcgtggctccctgacgcgcaacctgatcgactttttgatcaacatcggtagggaagtgaccaccgttagcctcaacatggcgacgaatggcatcgacagaacctttacggatcatgcggttgtcgatgttgatcccgctcatccggctttgcgcagtaaacggtacaaaggtggcatggaggctctgcacatcgcgctcgcgcaggttaaaacgctgcttggcgaggatcacaatactgcggccttccggcgtttcatcagccaggctagccagttgtgcggcgtcagccagcgttttttcatccacgccctgcgcggggataaactcgctcgcctgacggttaccgagtgtgatggtgccggttttatccagtagcagaacgtcaacgtcacctgccgcttcaactgcacgtccgctggtggcaatcacattcgcgcctagcatccggctcatcccggcgacgccgatcgcactcaacaggccgccaatagtggttgggatcagacagaccagcagcgccaccagtaccgttacgctgactgcattaccgccccacgcggaaaacggccacagcgtggcggttgccagtaaaaagacgatagtcagggcaatcagcagaatggtcagggcaatttcgttcggcgttttgcgtcgctgtgcgccttccaccatcgcgaacatccgatccagaaatgtctcgccggggttaacgctacactcaatcaccagccagtcagaaagaatacgcgtgccgccggtgacggaggcaaaatcgccgccggattcacggatcaccggtgcgctttccccggtgatggcgctttcatcgacgcttgcacccccttcaataacttcaccatcgcaggggataatatcgccagcttctaccagtacgatatcgcctttacgaagttggtcggcaggaactttgtccgccgcagcgccatatttcggctcacgcagcttgcgggcaaaggcagtttttttcacccctttcagactgttggcctgcgctttactgcggccttctgccagcgcctcggcgaaattagcgaacagtacggtgatccacagccaaccgctaatggccgcgctaaacagcgcattgccgggcatcgcaccgcttgccatcgcgatgctaatacaggtggtcagcagactgccgatccagacgataaacatcaccggattgcgccattgcgcctgcgggtttaattttttcaccgcttctttcagcgcctgaacgacaagtgttggttcgaatagcgccagttgtttacgactcatattcagtgctcactcaatatcatcaggagagatattccgccaccggaccaagcgccagggcagggataaaggtcagtgcgccaaccagcaacacggtgccgattaacaggccaacaaacagcgggccgtgcgttggcagcgtgccggagctggcggcttggctctttttactcaccaggctaccggcaattgccatcaccgggataatcaccccgaagcgaccgacaaacatgcagaacgccagtaaacagttccagaacggagagttggcgcttaatccggcaaaggcgctgccgttgttgttagcggcggaactcacggcgtacagcacttcgctaaaaccatgcgggccagggttgagcatggcgctacgtccggcgtcggtcatcatcgccaacgccgcgcccatcagcaccagcgtcggggtaaccagaattgccagtgcagtcagtttcatctcgcgtacgtcgatttttttacccagatattccggtgtacgaccaatcatcagcccggcaataaacaccgccagcaggacaaacagcatcatgccgtaaagaccagaaccgacaccgccgaacaccacttcaccaatttgcatcagccacatcggcaccatgccaccgagagcggtaaagctatcatgcatcgcaatcaccgcgccacaggaagccgccgtcgtcacgaccgcaaacaggctactgaccagcacgccgaaacggctctctttaccttccatattgatgctgctgtccgtgcccagtgccagcagatgaggattaccctgaacttctgcccacatcaccacgcctacgcagatgacaaaaatcacactcatcgcccacagcaacatgcgcccctggcggcgatcgcccatcacttcaccaaaggcaaagcacagcgccgttgggatcaagaagatcgccagcatctgcacgaagttggtcagtgcggttgggttttcaaacggatggctgctgttggcattaaagaagccaccgccgttagtaccgagcatcttgatcgcttcctgagaagctacaggccccatgggtaacagctgttgcgctccttcaacggtattcacagcctgataaggcagaaagttttgcagcgcaccttgttgaataaaaaacagtgcaatcaacaacgccacagggactagcacccataacgtgatgcgtagcagatcgacccaggcattcccgagcgtgctcatgctctggcgggtaaacgcacggatgagggcaaaaatcaccgcaatcccgctggcggcagaaagaaagttttgcaccgttaagcccgccatctggctgaaatagctcaacgtggtttcaccgctataagattgccagttggtattggtgacaaagctgacggcggtattcagcgccagatcccagctcagccctggcaactgctgtggattaagcggcagatagtgctgaccgagcaacataaaaaacagcaccgccagccccagcatgttcaggccgagaatggcacaaagatattgcttccagttcatctcacggtcagagacgccaagtgcgcgaaaaagtacgcgctcaacgcccgttgtaccgggaagaggaatgtcattaatcagccgcgccagcccgctgcctaaaggacgcgccagcaccattaacaccagtaaaaacgtggcgatcagtaagaacccttgcgcagccatcagaacgcctccgcattgatcagggcataaaccagataacccagtaataaaaacaccagcaatacgccggttatcacgcctgcactcacagtgcacctccagtggcctaaaagtgataccggaagggtagaattctggctgcaaagatttcgcaaaaatctgcgggcggggtgtaaaaaaagtataaaaatggcaaaagccatgatttaactaatgtttagtattaatttaacttttgtgtaacttaattacaggatgaatgtaaataaaccatcaataagcaaaaataagtggtcggatgagtagtaaaattacacaaaaggcggtactattttcatcagataaacaaattcatttttccggtgccattcaccgggtagatacaaaagggggagaaaagtatggaactctacagagaatatcctgcatggcttatctttttacgccgtacttatgcggttgcagcgggcgttctggcgctgcctttcatgcttttctggaaagaccgcgcccgcttttacagctacctgcatcgcgtctggagcaaaaccagcgataaaccggtgtggatggatcaggccgaaaaggcaactggtgatttttattgattgctgagttttgaatacattgaacgtctacacttactcctgtaaaccgctcaggagcagtaatgaatctacaacgatttgatgacagcaccctaatccgtatctttgcccttcatgagttacatcgactgaaagaacatggcttaacgcgcggggcgcttctcgattatcacagccgctataaactcgtctttctggcgcattctcagccggagtaccgcaaacttggcccgttcgtggctgatattcaccagtggcaaaatctggatgactattacaaccagtaccgccaacgcgtagttgttttgctttctcaccccgccaacccgcgcgatcacaccaatgttttgatgcacgttcagggttattttcgcccgcatattgattccacagaacgccagcagctggctgcgcttatcgacagttatcgccgtggcgagcaaccacttcttgcgccgctgatgcgtatcaaacactatatggcgctttatcctgacgcctggcttagtgggcagcgttatttcgaactttggccgcgtgtgattaacttgcgccatagtggagttttatgactacccatctggtctggtttcgccaggatttacgtctgcacgataatctcgcactggctgccgcctgccgcaatagctctgcacgcgtgctggcgttgtatatcgctacaccacgccagtgggcgacgcataacatgagcccgcgtcaggctgaacttatcaatgctcaactgaatgggctacaaatagcgcttgcggaaaaaggtattcctttattgttccgtgaagtggatgactttgtcgccagtgtcgaaatagttaaacaggtgtgcgcggaaaacagcgttacccacctgttttataactatcagtatgaagtgaatgagcgggcgcgggatgtggaagttgaaagagcgctgcgtaacgtggtgtgtgaaggatttgatgacagcgtgatcctgccgcctggcgcggtgatgaccggtaatcacgagatgtacaaagtctttacgccttttaagaatgcctggctgaaacggctgcgggaagggatgccggagtgcgtcgctgcgccaaaagttcgtagtagcggaagcatagagcccagcccatccattacgctgaattatcctcgtcagtctttcgatactgcgcattttccggtggaagaaaaagcggcgattgcgcaattacgccagttttgccagaacggtgccggagaatatgagcaacaacgagattttccggcagtggaaggcaccagccgtttgagcgccagcctggcaacgggcgggttaagccctcgccagtgcttgcatcgcttgttggctgaacagccgcaggcgctggacggtggggccggtagtgtctggcttaatgagctgatctggcgcgagttttaccgtcacctgataacgtatcaccccagcttgtgtaaacatcgtccatttattgcctggacggatcgtgtacagtggcagagcaatcccgcacatttacaggcctggcaggaaggcaaaacgggatacccgattgttgatgccgctatgcgtcagcttaacagcactggctggatgcataacaggctacggatgattacagccagttttctggtgaaagatttattgatcgactggcgcgaaggcgagcgatatttcatgagccagctgattgatggtgatttggcagccaataacggtggctggcagtgggccgctagtaccggaaccgatgcagcgccgtattttcgtattttcaacccgacaacccagggcgagaaatttgatcatgagggcgagtttatccgccagtggctaccggaactgcgcgatgtgccagggaaagtggtgcatgagccgtggaagtgggcgcagaaagcaggtgtgacgctggattatccgcaaccgatagtcgagcacaaagaagcgagagtacaaacgttggcagcgtatgaggcggcgcggaaggggaaataacagacgcgtcaggcaatcgagcccagatgccggatgcggcgtgaacgccttatccagcctacaaatttgtgcaaattcaataaattgcaggaaatacgtaggcctgataagacgcgtcaagcgtcgcatcaggcatcggtgctggcctattaagactccagcgccagcgcgcggtttctgaatttcagcgcctgatacagccaaatcatcagtaccagtcctacacacgccagtgcgccccaggtaatttgatcaaatacttcaatatatgcattgatggagtagttgatcgccccggaagcatcaaagctagcctggcttgtctgatcggcaatcacgcccgccagatagttcgcgatcgcgccagaaagcagcatgtagatgccggttaatacgccggtcacaccggggatttcaatgcgcgtaatttggctcatggcaaccgggtcgataaacagttccgcaaagcccatcaccgccaggcctaataccatcagtggcagagaagagtgaccatacattgcggaccagcgggcgcttaaggtcagaatgcagaatccggcgctcatcaggccaaggccaagagcaaatttcccccagatgcgcacggtacgattacccgcgacactctcttttaccacccacgccaggaacacaccgcacagcataactgcgaaggcattaatgctctggaacatcgcggtcggaacggtataaccaaacatatcgcggttaacgaagcggtcgatataaaggctaatgctgctaccgccctgttgtgcgaaggcccagaacaacatactgaagaaggtgagcgtcacaatcagccccagctccttccgctgtttctggttttctgctttgcgataaatttttgccagtacacccaggccaataatagtcgcgacaattaaggcgtatacgctccactctttccagaacagtatggtaatcagtgcaggcgttgccaccagcagaaccagcagccatccccagttcggcaggagaaagtttgtcgcacgcagtacttttttgttaacgccgcgggtatgagtgaaatgacgattgccacataagaaaatgaccagacccgcgatcatgccaaccgccgccaggccaaagcccatcgcccagctgtactcttcctgggcgtaaccacaggcgataggtgcgataatagaccccacgttacccgccgcatacatcaggctgaaaccgccatcacgacgcggatcggttggctcatacagctcgccgagcagacagcttacgttagatttaaacaggccatagccgcagacgataatcgccagggacagatagaggaaactcggatggatctcactggcacccagcaccacatgaccgatcgccatcaacaacgcccccagcatcaccgccatgcgattgccgagaactttatccgccaaaaagccaccgaggattggcgtgacatacaccaggctacagtaggcgctaaataactcgtaggcgtgagtatcgttgtattttagttgattggtgagatagagaatcagcagggcacgcatgccgtaaaagctaaaatattcccagatttgcagcgcaacgacatagtaaatagcgcgcggctgacttgcgtgtttattcataataattccacaattgacggcaacgtcacgtaatagttgcgcggcgtgcttgtgtttccttaaagttaaaactttgatacagatctgattatttatgcaatatgctgtctgattgcataaatatacattagctgaagcgtgatgatataaacaatttgcgtcttttggcgtcgggtttgtttcttaatatgtcaaaagattggctatcgacgaactggcgaggtaacgctatgttaacggtgtagctatcagaatacggaaggcgcgaagatgaaaaacaccgaactggaacaactgattaacgaaaaactgaacagcgcggcgattagtgattacgcgccgaatggtttgcaggtggaaggcaaagagacggtgcaaaaaattgttaccggtgtcaccgccagccaggctttgctcgatgaggcagtgcgtctgggcgcggatgcggtcattgtgcatcatggctacttctggaaaggagagtctccggtcattcgcggaatgaagcgtaaccgtttaaaaacgttgctggcgaatgatatcaacctgtatggctggcatttgccgcttgacgcacatcctgagctgggcaataacgcacagctggcggcgttactggggatcacggtcatgggcgaaattgagccgttggtgccgtggggcgaactgaccatgcctgtgccgggactggagctggcttcctggattgaagcgcgtctgggacgtaagccgttatggtgtggcgataccggacctgaggtggtccagcgcgtcgcctggtgcacgggcggcgggcaaagttttatcgatagcgccgcgcgttttggcgtggatgcttttattactggcgaagtttctgaacagaccattcatagtgcccgcgagcagggattgcatttttatgctgcaggtcaccatgccactgaacgtggtggtattcgcgcattgagcgagtggctgaatgaaaataccgatcttgatgtgacctttattgatattcctaatcctgcataacgaataatcagagggatcgaaagtgcaacgagcgcgttgttatctgataggtgaaacggcggtagtgctggaactggaaccgccggtgacgctggctagccagaaacggatctggcgactggcgcagcgtctggtggatatgccgaatgtggttgaagccattcccggcatgaacaatatcacggtgattttgcgtaatcctgagagcctggcgctggatgccatagagcgtttgcaacgctggtgggaggagagcgaggcgctggagccggagtctcgctttattgaaattccggtggtttacggtggtgcaggcggaccggatttggcggtggtcgcggcgcattgcgggttgagcgaaaaacaggttgttgaattgcactcctccgtggaatacgtggtctggtttttaggttttcaaccgggcttcccgtatctcgggagtttgccggaacaactacacacgccacggcgcgctgaaccgcgcttactcgttccggcaggttctgtcgggatcggcgggccgcagactggtgtttatccgctggcaacgccgggtggctggcagttgattggtcataccagtctcagcctgtttgatccggcgcgtgacgaacccatcttattacgtccgggagacagcgtgcgctttgtaccgcagaaggagggagtatgctgaagattattcgtgcgggcatgtataccactgtgcaggatggcggtcgtcacggttttcgccagagcggtatcagccactgcggcgcactggatatgcccgcgttacgcattgctaacctactggtgggtaatgacgccaatgcccccgcgctggagatcacgctcggtcagttaactgttgagttcgaaactgatgggtggtttgctctgacgggtgccggttgcgaagcgcggctggatgataatgccgtctggaccggctggcgattgccgatgaaagcaggccagcgtttaacgcttaaacgcccgcagcacgggatgcgcagttatctggcggtcgcgggtggtattgatgttccgccggtaatgggcagttgcagcaccgatctcaaagtggggattggcgggctggaaggccgtttactgaaggatggtgaccgactcccgattggcaaaagcaagcgtgattctatggaagcgcagggcgttaaacagctgctgtggggcaaccgcattcgcgccttgccggggccggaatatcatgagttcgatcgcgccagccaggatgcattctggcgtagcccctggcagcttagcagccaaagtaaccgcatgggctatcgcttacaggggcaaattttaaaacgcaccaccgatcgcgaactgttatctcacggtttgttaccgggcgtggtgcaggtgccacataacgggcagccgattgtgttgatgaacgacgcacagaccaccggtggttacccgcgtattgcctgtatcattgaggctgatatgtaccatctggcgcaaattccgctcggtcagccgattcattttgtccagtgtagtctggaagaggcactaaaagcacggcaagatcagcaacgttattttgaacaattagcgtggcggctgcacaatgaaaattgacctgaacgccgatctgggcgaaggctgcgccagcgacgcagagctattaacgctggtttcctctgccaatattgcctgtggatttcatgcaggcgatgcgcaaatcatgcaggcttgcgtgcgtgaagcaataaaaaatggtgtcgcgattggcgctcacccgagttttcccgacagggaaaattttggtcgcagcgccatgcagctgccgccagaaaccgtttacgcccagacgctgtatcaaattggcgcgctggcaacgattgcccgtgcgcaaggcggcgtaatgcgtcatgtcaaaccgcacggcatgttgtacaaccaggcggcgaaagaagcacaactggcagacgccatcgccagagcggtatacgcttgcgatccagcattgattctcgtcgggctggcgggaagcgagctgattcgtgcaggcaagcaatatggtctgacaacgcgcgaggaagtgtttgccgatcgcggttatcaggctgacggcagcctggtgccgcgaagccagagtggcgcgttgattgaaaacgaagaacaggcgctggcgcaaacgctggagatggtgcaacacggcagagtcaaaagtatcaccggcgaatgggcaacggtcgcggcgcaaacggtctgcctgcatggcgacggcgagcacgcactggcgttcgcccgccgactacgctctgcatttgccgaaaaggggattgttgtcgcagcataaccccgattaataaagaatgaaaaaaggatatcaccatgcctgaaggcccggagatccgccgtgcagcggataacctggaggcggcgatcaaaggcaaaccactaactgatgtctggtttgccttcccgcagttaaaaccttatcaaagtcaacttatcggtcaacacgttacccatgtggaaacgcgtggtaaggcgttgttaactcatttttccaacgacttaacgctctacagccataatcagctttacggcgtctggcgcgtggttgataccggcgaagagccgcagaccacgcgagtattgcgggtaaaactgcaaacggctgacaaaaccattctgctttatagcgccagcgatattgagatgttgaccccggaacaactgaccacgcatccgtttttacaacgcgttggtcccgatgtgctggatccgaatctgacgccggaggtggtgaaagaacgattattgagcccgcgctttcgtaaccgtcagtttgctggattactgctcgatcaggcgtttctggctgggcttggcaattatttgcgggtggagatcctctggcaggttgggttgactggaaatcataaagcgaaagatctcaatgcggcgcaactggatgcactcgcacacgcgttactggagattcctcgattttcctacgctacgcgggggcaggtggatgagaataagcatcatggggcgctgtttcgctttaaggtttttcatcgagatggcgaaccgtgcgaacgttgtggcagcatcattgagaaaaccacgctgagttctcgcccgttttactggtgccctggctgccagcattaagcgctccgcttcggcgcataggtactaataaaccgcgcaatggcaggccctgtcagcaaaatactgaacaggcgtagggtttgcatcgccataatgagcgccatatcggcattgctccctgcggcgatgaccgccacggtatcaagcccgccggggctggtggcgaggtaggcagtcataaaatcaatgtgcataaaccgggtcagcccccacgccatacccgcacaaatagccagcagagcaaaaatgctcagcaggatttgcggtagcgggcgtagtgcccgcagtaagatttgtttatcgaaaccaagaccaatccgccagccaattgccatatacgccatcgccagcagccattccggtagttcgatggtgatgagctgaccagactggagcactgcgcccgccagcatcgggatgagcatcgtgccggaaggaagacgcagcaggcatcccactgtaccggcaacgaccgcgagcaaaatagtaagcaggagattaatgctcactggcgggaaccagacgatatgctggttaaccgcttcagcgttatcgcccagcatcatgcgggtgaccagaacagcggcccccgcgacgaacagcactcgcagatattgcataaacgccaccaggcgaatatctgcgccgtaatcttgcgccatagcgaccattgccgccgcgccgccaggagaggagccccaggcaccggtatttccaggcaaactgctatagcgcaccaataaccaacccacaatggcgctggaaagcagcgttaccagtaaaattgcaagcacgatcggccagttgacggccagggtggtgagaatgctaccagtgaggttttgcgcaatcatgcagccaagaatggcctgggcggcgagaaaagcagagcggggaagttgcagagtaattccgcgcatactaaagatgatcccggcgatcatcggcccaagtaatagcgccgccgggagatgtaccgcgaggaaaccaatagaaaggagaagacttagcacacataacattccccactgcaaaactggcatccttcgctccctcattattttctctttggtgtatcgatacagcataaagaaagctgggccaggaaaaaataacagcaatcaaggaaaaggggaaaatcagcaattttctgaaagagatgccctttccggcggcaaagggcatcatggtaaatcagttatagttaatcttaaaaagcaccactgtatcgaaggggccagcctcgatgggggtgcctggaatggagctaagttcagccgtataggttttttcgtagaccaacatgtcactggtgaaatcggcgtattcagcatatttattgaaggtataagggctggcgttttcatccagtaaacgtagcttcagaccattaccaatcaacaatgctttatcttcttcaaccaacgtttcttcggtataaaaggaggaactgactttaaatccgtcggtgcattgatcgttttggctcttggtcgttttaatactgaacgttttgctcattgtgtggcgacgtatatccagcaaattaaatttaccaaaatcaatcacctgtgtttccggactaatggaaaaattgacgctgcaatccagcacgcgaatgttttccagaccagtaatatgatatttcaggttttgggcagtagggtcttcgttaacgctaccggcaccgtcaaattgcacgacgatatagtcgctaagcgtactttgataatcatgcggcggcatttctcgtattttgacgtataaccgcatgcgagcgagaaaggtacggctcatatgaatattagcgggatcgccgctgcaaattttgttctgccatcccatcgcgatgatctgctcaggggtataaatatcaatgttcttactgtcgatacactggttagtgtcgatgcgactttttcccagactggcatcgtaatcgacaccgttgtatgtcacgccgagttgataataacgatcctgcacccccggataggggtttacccaggcgtagacatgctcgctttcaaagttgccgttggtattgttgtcacaatagacgggaattttaatatcgtcagattcccagatcttatcaccgggtttggcattgcctggtacagcaaacggttgaatcgcttcacttttttctactgcgccaccagatgtaccaaaatagcagttcagcgccattgcagacttcaacggcagaaataacaggcagatgacgagcaacaatcccttgccagcactcatttcgcctccactgcttgtaaacggcattgtccgctgcagttgagcgtcgtcatgcgtaatgcgccgtaatcatccatgtaaccgagataaaactggctgccgctataacttccggtgtttgtgttgaccgtactaaaaggtgcaaccatcacggttttgaagcctgggagaacgcctttttcatttctccccagataggcaatggtcagataatacgcggtaggatttttcagtgtcagttggttgccctgctggctgacctgtaactgcagttcgaccttttctcctgctttcttgcgtaatgcagccggtcgccagaacaatttaatacgactttgaatagcgacctgaagtatcgcatggtcgctgcttttatccggagcgggaggaatttcgcgcatattgtagaaaaatagcgtttcgcgatcgccaggtaattgtgtggtactggcttgtttcacaacccgcacctggcttgtcgctttcggttccagacgttgaatagggggcaaagcgaccagaagagcatcgcttttctcccctttttcattttctatccaggaataagcaagataaggcagtttgtcactttggttttcgatacgcaggctggtggctttgtcattggcgttaaacacaatgcgtgtgcgatcgggttgcaccgcagcattgcaacccaagctgatggttaacaacattaagggtaatcctttaataaatgtcattctcttttccttaattaatgacaaggtaaaatcaggcgtttggtcgtgtcttccagacgttctggcagatgaataatgcagctttgctcaccccagaccacggtaaacagttgattttcagcgacaccgcttaaccaggcatgtccttcctcgccaaccatacccacgctaatgccgctgtcatcctggcggatatccgcaccgaggggagggaactgaccgctggcgttgcgtatgatgacgttaacgtctttaccggaacgggaagccagacttttgtaacctatcgcgccttcaatccatgtttccttgatgacgttttctgcaactgttacgccgtcgggtaagtcattcatgttcaccgccacggtggaaggctggtaactggaaatcaacggcaccaccgcaatgccaaaatggttggtgtagtcgagattgccctgaaccggaatatctgccacgccatcggtgctgaccatcaggcgtggttcattggtggagctgcggcgatgaaatgctgcaccatattgggttgcggtgaaagaaccgctccagctgctgctgacggaactgtaatcactggcggcataggtaccagaaatatcccactcacccgcactactcaggtgctgatagttaccgctcacctgggctccattgtccggacgatcggattgcagtccggcagacatgccccagctattacgttcatccagcgtatcgttccagctcatgcggtgtatggtgctgtggctactgttttgcatgtcatagccaacccgaccaccgttaccgaaggggaggctaatgctcagataaatctggttgtcgcgatctttatcttcgtagtgggtcgtattgaaactcgtgctaatgctgatatctctccagtcaccaatatcaacattaaaacctgctgtgatgttggcggtcgtggaggcgtctgcattccaccaggtttgatgtagcaggttggcgtaaagattgaggtttagtggggtaatcggttggcccacggataagctgatcgtctgtttttcgtcctgcgcatcgctgtcgttgtatttgtgatccagatagttggcgtagctgtgaaaatgacgatcactgaagcgataagcggcgaggctaatcgtgctgttggtggcatccacttgtttgctgtaattaaaacggtagcttaagccccgctcgtcctgctgagtatcaaaatggctactggcccaggtgacatcaaaggacagtgcgccaagccacagcatattttgcccgatacccattgcggcagaatggtagtcatcatcagaaatcagcaggccgccgtacaggctggtgttactgagcatcccccaggaaacttcattgctaaaaaaggtttcattttcagtttgatgactcatggaaggccgtggctgacccgcggccaatttatagcgaacctgtccctggcgagtcaggaagggcgtgcttgctgcgctaacctggaaattgttcacccgaccatcttcttccgtcactttgacatccagcgtgccctgaacagactgattgaggtcatcaataataaacgggcctggcgggacttttttctggtaaatgacgcggccactttgactgatcgtcaccgtggcattggtctgtgcaataccgctaatttgtggggcgtagccacgcagctcccacggtaacattcgatcgtcactcgccagtgccgcgccggtataagaaaaaccatcgaaaatattggaactgaaatcggtttcgccgagggttaacttagagcctaattgcggtaatggacgaaaaagataggtgcggcttattccgccactctggtcatggttatcttcgctatcggtcttattaagctggtaatcactgcgtaagcgccatgccccggcgttaattccggcggtaccgtaggcattcaggttagtgctgctgctgccgtcctgtgggcggtagctgctggcaaacaagttgtaatccatcaggacaccggcaacaccttctttccatgtagaggggggagcccagttttcactgtgccacgccagccaggcttgcggaatactaatattcagttgctgattggcttgatcgaaattgaagagcatttcaggtcgggaactgaaatcaatacaccgatctatctgtggcaaggactgacggacatctggttttaaaccaaatttatcgaccagactatcattgatgcatggaatggttttgtcaccctttttttgccagttaattttttgcccattactgattttgttgttattcaccgcaacgctaacaaaatattcaccgggagcaatgactcctttttcctttaataaactaatatcaatgcggtcgcgcatacttttatcgagaacattcagattgaattcgaccgccattgcgcaaggcatcgccatgaccaggcaggatacaaaagagagtcgataaatattcacggtgtccatacctgataaatattttatgaaaggcggcgatgatgccgccaaaataatacttatttataatccagcacgtaggttgcgttagcggttacttcacctgccgtgacatcgactgcattatcaatttgttccatccaggcgaaaaagttcagcgtctgttcactactgcttgcatccaggtcaagatctggcgcggcactacctaatacgatgttaccgtcatttttgtccatcagtcgtacaccgaccccagttgcttcgcctgcactggtgttgctcaacaaaggcgtagcaccagttgtcttagccgtgctatcgaaggttacgccaactttggataccggcattccgctaccgttgtcagaagcaggcagatcacagttgatcaagcgaatgtcgacggccactttattgctatgatgctcccggtttatatgggttgtcgtgacttgtccaagatctatgtttttatcaatatcttctggatgaatttcacaaggtgcttcaataacctcccccttaaagtgaatttcgccagaaccttcatcagcagcataaacaggtgcagtgaacagcagagatacggccagtgcggccaatgttttttgtcctttaaacataacagagtcctttaaggatatagaataggggtatagctacgccagaatatcgtatttgattattgctagtttttagttttgcttaaaaatattgttagttttattaaatgcaaaactaaattattggtatcatgaatttgttgtatgatgaataaaatataggggggtatagatagacgtcattttcatagggttataaatgcgactaccatgaagtttttaattgaaagtattgggttgctgataatttgagctgttctattctttttaaatatctatataggtctgttaatggattttatttttacaattttttgtgtttaggcatataaaaatcaacccgccatatgaacggcgggttaaaatatttacaacttagcaatcaaccattaacgcttgatatcgcttttaaagtcgcgtttttcatatcctgtatacagctgacgcggacgggcaatcttcataccgtcactgtgcatttcgctccagtgggcgatccagccaacggtacgtgccattgcgaaaatgacggtgaacatggaagacggaatacccatcgctttcaggatgataccagagtagaaatcgacgttcgggtacagtttcttctcgataaagtacgggtcgttcagcgcgatgttttccagctccatagccacttccagcaggtcatccttcgtgcccagctctttcagcacttcatggcaggtttcacgcattacggtggcgcgcgggtcgtaatttttgtacacgcggtgaccgaagcccatcaggcggaaagaatcatttttgtctttcgcacgacgaacaaattccggaatgtgtttaacggagctgatttcttccagcattttcagcgccgcttcgttagcaccgccgtgcgcaggtccccacagactagcaatacctgctgcgatacaggcaaacgggttcgcaccgctagagccagcggtacgcacggtggaggtagaggcgttctgttcatggtcagcgtgcaggatcagaatacggtccatagcacgttccagaatcggattaacttcatacggttcgcacggcgtggagaacatcatattcaggaagttaccggcgtaggagagatcgttgcgcgggtaaacaaatggctgaccaatggaatacttgtaacacatcgcggccatggtcggcattttgctcagcaggcggaacgcggcaatttcacggtgacgaggattgttaacatccaggctgtcgtgatagaacgccgccagcgcgccggtaataccacacatgactgccattggatggctgtcgcgacggaaagcatggaacagacgggtaatctgctcgtggatcatggtatgacgggtcaccgtagttttaaattcgtcatactgttcctgagtcggtttttcaccattcagcaggatgtaacaaacttccaggtagttagaatcggtcgccagctgatcgatcgggaaaccgcggtgcagcaaaataccttcatcaccatcaataaaagtaattttagattcgcaggatgcggtactagtgaagcctgggtcaaaggtgaacacacctttactaccgagagtacggatatcaataacatcttgacccagcgtgcctttcagcacatccagttcaacagctgtatccccgttgagggtgagttttgcttttgtatcagccatttaaggtctccttagcgccttattgcgtaagactgccggaacttaaatttgccttcgcacatcaacctggctttacccgttttttatttggctcgccgctctgtgaaagaggggaaaacctgggtacagagctctgggcgcttgcaggtaaaggatccattgatgacgaataaatggcgaatcaagtacttagcaatccgaattattaaacttgtctaccactaataactgtcccgaatgaattggtcaatacttccacactgttacataagttaatcttaggtgaaataccgacttcataacttttacgcattatatgcttttcctggtaatgtttgtaacaactttgttgaatgattgtcaaattagatgattaaaaattaaataaatgttgttatcgtgacctggatcactgttcaggataaaacccgacaaactatatgtaggttaattgtaatgattttgtgaacagcctatactgccgccaggtctccggaacaccctgcaatcccgagccacccagcgttgtaacgtgtcgttttcgcatctggaagcagtgttttgcatgacgcgcagttatagaaaggacgctgtctgacccgcaagcagaccggaggaaggaaatcccgacgtctccaggtaacagaaagttaacctctgtgcccgtagtccccagggaataataagaacagcatgtgggcgttattcatgataagaaatgtgaaaaaacaaagacctgttaatctggacctacagaccatccggttccccatcacggcgatagcgtccattctccatcgcgtttccggtgtgatcacctttgttgcagtgggcatcctgctgtggcttctgggtaccagcctctcttcccctgaaggtttcgagcaagcttccgcgattatgggcagcttcttcgtcaaatttatcatgtggggcatccttaccgctctggcgtatcacgtcgtcgtaggtattcgccacatgatgatggattttggctatctggaagaaacattcgaagcgggtaaacgctccgccaaaatctcctttgttattactgtcgtgcttagtcttctcgcaggagtcctcgtatggtaagcaacgcctccgcattaggacgcaatggcgtacatgatttcatcctcgttcgcgctaccgctatcgtcctgacgctctacatcatttatatggtcggttttttcgctaccagtggcgagctgacatatgaagtctggatcggtttcttcgcctctgcgttcaccaaagtgttcaccctgctggcgctgttttctatcttgatccatgcctggatcggcatgtggcaggtgttgaccgactacgttaaaccgctggctttgcgcctgatgctgcaactggtgattgtcgttgcactggtggtttacgtgatttatggattcgttgtggtgtggggtgtgtgatgaaattgccagtcagagaatttgatgcagttgtgattggtgccggtggcgcaggtatgcgcgcggcgctgcaaatttcccagagcggccagacctgtgcgctgctctctaaagtcttcccgacccgttcccataccgtttctgcgcaaggcggcattaccgttgcgctgggtaatacccatgaagataactgggaatggcatatgtacgacaccgtgaaagggagcgactatatcggtgaccaggacgcgattgaatatatgtgtaaaaccgggccggaagcgattctggaactcgaacacatgggcctgccgttcagccgtctcgatgatggtcgtatctatcaacgtccgtttggcggtcagagcaaaaacttcggcggcgagcaggcggcacgcactgcggcagcagctgaccgtaccggtcacgcactgttgcacacgctttatcagcagaacctgaaaaaccacaccaccattttctccgagtggtatgcgctggatctggtgaaaaaccaggatggcgcggtggtgggttgtaccgcactgtgcatcgaaaccggtgaagtggtttatttcaaagcccgcgctaccgtgctggcgactggcggagcagggcgtatttatcagtccaccaccaacgcccacattaacaccggcgacggtgtcggcatggctatccgtgccggcgtaccggtgcaggatatggaaatgtggcagttccacccgaccggcattgccggtgcgggcgtactggtcaccgaaggttgccgtggtgaaggcggttatctgctgaacaaacatggcgaacgttttatggagcgttatgcgccgaacgccaaagacctggcgggccgtgacgtggttgcgcgttccatcatgatcgaaatccgtgaaggtcgcggctgtgatggtccgtgggggccacacgcgaaactgaaactcgatcacctgggtaaagaagttctcgaatcccgtctgccgggtatcctggagctttcccgtaccttcgctcacgtcgatccggtgaaagagccgattccggttatcccaacctgtcactacatgatgggcggtattccgaccaaagttaccggtcaggcactgactgtgaatgagaaaggcgaagatgtggttgttccgggactgtttgccgttggtgaaatcgcttgtgtaagcgtacacggcgctaaccgtctgggcggcaacagcctgctggacctggtggtctttggtcgcgcggcaggtctgcatctgcaagagtctatcgccgagcagggcgcactgcgcgatgccagcgagtctgatgttgaagcgtctctggatcgcctgaaccgctggaacaataatcgtaacggtgaagatccggtggcgatccgtaaagcgctgcaagaatgtatgcagcataacttcagcgtcttccgtgaaggtgatgcgatggcgaaagggcttgagcagttgaaagtgatccgcgagcgtctgaaaaatgcccgtctggatgacacttccagcgagttcaacacccagcgcgttgagtgcctggaactggataacctgatggaaacggcgtatgcaacggctgtttctgccaacttccgtaccgaaagccgtggcgcgcatagccgcttcgacttcccggatcgtgatgatgaaaactggctgtgccactccctgtatctgccagagagcgaatccatgacgcgccgaagcgtcaacatggaaccgaaactgcgcccggcattcccgccgaagattcgtacttactaatgcggagacaggaaaatgagactcgagtttagtatttatcgctataacccggatgttgatgatgctccgcgtatgcaggattacaccctggaagcggatgaaggtcgcgacatgatgctgctggatgcgcttatccagctaaaagagaaagatcccagcctgagcttccgccgctcctgccgtgaaggtgtgtgcggttccgacggtctgaacatgaacggcaagaatggtctggcctgtattaccccgattagcgcactcaaccagccgggcaagaagattgtgattcgcccgctgccaggtttaccggtgatccgcgatttggtggtagacatgggacaattctatgcgcaatatgagaaaattaagccttacctgttgaataatggacaaaatccgccagctcgcgagcatttacagatgccagagcagcgcgaaaaactcgacgggctgtatgaatgtattctctgcgcatgttgtagtacctcttgtccgtctttctggtggaatcccgataagtttatcggcccggcaggcttgttagcggcatatcgtttcctgattgatagccgtgataccgagactgacagccgcctcgacggtttgagtgatgcattcagcgtattccgctgtcacagcatcatgaactgcgtcagtgtatgtccgaaggggctgaacccgacgcgcgccatcggccatatcaagagcatgttgttgcaacgtaatgcgtaaaccgtaggcctgataagacgcgcaagcgtcgcatcaggcaaccagtgccggatgcggcgtgaacgccttatccggcctacaagtcattacccgtaggcctgataagcgcagcgcatcaggcgtaacaaagaaatgcaggaaatctttaaaaactgcccctgacactaagacagtttttaaaggttccttcgcgagccactacgtagacaagagctcgcaagtgaaccccggcacgcacatcactgtgcgtggtagtatccacggcgaagtaagcataaaaaagatgcttaagggatcacgatgcagaacagcgctttgaaagcctggttggactcttcttacctctctggcgcaaaccagagctggatagaacagctctatgaagacttcttaaccgatcctgacagcgttgacgctaactggcgtaacacgttccagcagttacctggtacgggagtcaaaccggatcaattccactctcaaacgcgtgaatatttccgccgcctggcgaaagacgctagtcgttactctagtacgatctccgaccctgacaccaatgtgaagcaggttaaagtcctgcagctcattaacgcataccgcttccgtggtcaccagcatgcgaatctcgatccgctgggactgtggcagcaagataaagtggccgatctggatccgtctttccacgatctgaccgaagcagacttccaggagaccttcaacgtcggtagttttgccagcggcaaagaaaccatgaaactcggcgagctgctggaagccctcaagcaaacctactgcggcccgattggtgccgagtatatgcacattaccagcaccgaagaaaaacgctggatccaacagcgtatcgagtctggtcgcgcgactttcaatagcgaagagaaaaaacgcttcttaagcgaactgaccgccgctgaaggtcttgaacgttacctcggcgcaaaattccctggcgcaaaacgcttcagcctggaaggcggtgacgcgttaatcccgatgcttaaagagatgatccgccacgctggcaacagcggcacccgcgaagtggttctcgggatggcgcaccgtggtcgtctgaacgtgctggtgaacgtgctgggtaaaaaaccgcaagacttgttcgacgagttcgccggtaaacataaagaacacctcggcacgggtgacgtgaaataccacatgggcttcagctctgacttccagaccgatggcggcctggtgcacctggcgctggcgtttaacccgtctcaccttgagattgtaagcccggtagttatcggttctgttcgtgcccgtctggacagacttgatgagccgagcagcaacaaagtgctgccaatcaccatccacggtgacgccgcagtgaccgggcagggcgtggttcaggaaaccctgaacatgagcaaagcgcgtggttatgaagttggcggtacggtacgtatcgttatcaacaaccaggttggtttcaccacctctaatccgctggatgcccgttctacgccgtactgtactgatatcggtaagatggttcaggccccgatttttcacgttaacgcggacgatccggaagccgttgcctttgtgacccgtctggcgctcgatttccgtaacacctttaaacgtgatgtcttcatcgacctggtgtgctaccgccgtcacggccacaacgaagccgacgagccgagcgcaacccagccgctgatgtatcagaaaatcaaaaaacatccgacaccgcgcaaaatctacgctgacaagctggagcaggaaaaagtggcgacgctggaagatgccaccgagatggttaacctgtaccgcgatgcgctggatgctggcgattgcgtagtggcagagtggcgtccgatgaacatgcactctttcacctggagcccgtacctcaaccacgaatgggacgaagagtacccgaacaaagttgagatgaagcgcctgcaggagctggcgaaacgcatcagcacggtgccggaagcagttgaaatgcagtctcgcgttgccaagatttatggcgatcgccaggcgatggctgccggtgagaaactgttcgactggggcggtgcggaaaacctcgcttacgccacgctggttgatgaaggcattccggttcgcctgagcggtgaagactccggtcgcggtaccttcttccaccgccacgcggtgatccacaaccagtctaacggttccacttacacgccgctgcaacatatccataacgggcagggcgcgttccgtgtctgggactccgtactgtctgaagaagcagtgctggcgtttgaatatggttatgccaccgcagaaccacgcactctgaccatctgggaagcgcagttcggtgacttcgccaacggtgcgcaggtggttatcgaccagttcatctcctctggcgaacagaaatggggccggatgtgtggtctggtgatgttgctgccgcacggttacgaagggcaggggccggagcactcctccgcgcgtctggaacgttatctgcaactttgtgctgagcaaaacatgcaggtttgcgtaccgtctaccccggcacaggtttaccacatgctgcgtcgtcaggcgctgcgcgggatgcgtcgtccgctggtcgtgatgagcccgaaatccctgctgcgtcatccgctggcggtttccagcctcgaagaactggcgaacggcaccttcctgccagccatcggtgaaatcgacgagcttgatccgaagggcgtgaagcgcgtagtgatgtgttctggtaaggtttattacgacctgctggaacagcgtcgtaagaacaatcaacacgatgtcgccattgtgcgtatcgagcaactctacccgttcccgcataaagcgatgcaggaagtgttgcagcagtttgctcacgtcaaggattttgtctggtgccaggaagagccgctcaaccagggcgcatggtactgcagccagcatcatttccgtgaagtgattccgtttggggcttctctgcgttatgcaggccgcccggcctccgcctctccggcggtagggtatatgtccgttcaccagaaacagcaacaagatctggttaatgacgcgctgaacgtcgaataaataaaggatacacaatgagtagcgtagatattctggtccctgacctgcctgaatccgtagccgatgccaccgtcgcaacctggcataaaaaacccggcgacgcagtcgtacgtgatgaagtgctggtagaaatcgaaactgacaaagtggtactggaagtaccggcaagtgcagacggcattctggatgcggttctggaagatgaaggtacaacggtaacgtctcgtcagatccttggtcgcctgcgtgaaggcaacagcgccggtaaagaaaccagcgccaaatctgaagagaaagcgtccactccggcgcaacgccagcaggcgtctctggaagagcaaaacaacgatgcgttaagcccggcgatccgtcgcctgctggctgaacacaatctcgacgccagcgccattaaaggcaccggtgtgggtggtcgtctgactcgtgaagatgtggaaaaacatctggcgaaagccccggcgaaagagtctgctccggcagcggctgctccggcggcgcaaccggctctggctgcacgtagtgaaaaacgtgtcccgatgactcgcctgcgtaagcgtgtggcagagcgtctgctggaagcgaaaaactccaccgccatgctgaccacgttcaacgaagtcaacatgaagccgattatggatctgcgtaagcagtacggtgaagcgtttgaaaaacgccacggcatccgtctgggctttatgtccttctacgtgaaagcggtggttgaagccctgaaacgttacccggaagtgaacgcttctatcgacggcgatgacgtggtttaccacaactatttcgacgtcagcatggcggtttctacgccgcgcggcctggtgacgccggttctgcgtgatgtcgataccctcggcatggcagacatcgagaagaaaatcaaagagctggcagtcaaaggccgtgacggcaagctgaccgttgaagatctgaccggtggtaacttcaccatcaccaacggtggtgtgttcggttccctgatgtctacgccgatcatcaacccgccgcagagcgcaattctgggtatgcacgctatcaaagatcgtccgatggcggtgaatggtcaggttgagatcctgccgatgatgtacctggcgctgtcctacgatcaccgtctgatcgatggtcgcgaatccgtgggcttcctggtaacgatcaaagagttgctggaagatccgacgcgtctgctgctggacgtgtaatagtttaagtttcacctgcactgtagaccggataaggcattatcgccttctccggcaattgaagcctgatgcgacgctgacgcgtcttatcaggcctacgggaccaccaatgtaggtcggataaggcgcaagcgccgcatccgacaagcgatgcctgatgtgacgtttaacgtgtcttatcaggcctacgggtgaccgacaatgcccggaagcgatacgaaatattcggtctacggtttaaaagataacgattactgaaggatggacagaacacatgaacttacatgaatatcaggcaaaacaactttttgcccgctatggcttaccagcaccggtgggttatgcctgtactactccgcgcgaagcagaagaagccgctagtaaaatcggtgccggtccgtgggtagtgaaatgtcaggttcacgctggtggccgcggtaaagcgggcggtgtgaaagttgtaaacagcaaagaagacatccgtgcttttgcagaaaactggctgggcaagcgtctggtaacgtatcaaacagatgccaatggccaaccggttaaccagattctggttgaagcagcgaccgatatcgctaaagagctgtatctcggtgccgttgttgaccgtagttcccgtcgtgtggtctttatggcctccaccgaaggcggcgtggaaatcgaaaaagtggcggaagaaactccgcacctgatccataaagttgcgcttgatccgctgactggcccgatgccgtatcagggacgcgagctggcgttcaaactgggtctggaaggtaaactggttcagcagttcaccaaaatcttcatgggcctggcgaccattttcctggagcgcgacctggcgttgatcgaaatcaacccgctggtcatcaccaaacagggcgatctgatttgcctcgacggcaaactgggcgctgacggcaacgcactgttccgccagcctgatctgcgcgaaatgcgtgaccagagccaggaagatccgcgtgaagcacaggctgcacagtgggaactgaactacgttgcgctggacggtaacatcggttgtatggttaacggcgcaggtctggcgatgggtacgatggacatcgttaaactgcacggcggcgaaccggctaacttccttgacgttggcggcggcgcaaccaaagaacgtgtaaccgaagcgttcaaaatcatcctctctgacgacaaagtgaaagccgttctggttaacatcttcggcggtatcgttcgttgcgacctgatcgctgacggtatcatcggcgcggtagcagaagtgggtgttaacgtaccggtcgtggtacgtctggaaggtaacaacgccgaactcggcgcgaagaaactggctgacagcggcctgaatattattgcagcaaaaggtctgacggatgcagctcagcaggttgttgccgcagtggaggggaaataatgtccattttaatcgataaaaacaccaaggttatctgccagggctttaccggtagccaggggactttccacagtgaacaggccattgcatacggcactaaaatggttggcggcgtaaccccaggtaaaggcggcaccacccacctcggcctgccggtgttcaacaccgtgcgtgaagccgttgctgccactggcgctaccgcttctgttatctacgtaccagcaccgttctgcaaagactccattctggaagccatcgacgcaggcatcaaactgattatcaccatcactgaaggcatcccgacgctggatatgctgaccgtgaaagtgaagctggatgaagcaggcgttcgtatgatcggcccgaactgcccaggcgttatcactccgggtgaatgcaaaatcggtatccagcctggtcacattcacaaaccgggtaaagtgggtatcgtttcccgttccggtacactgacctatgaagcggttaaacagaccacggattacggtttcggtcagagcacctgtgtcggtatcggcggtgacccgatcccgggctctaactttatcgacattctcgaaatgttcgaaaaagatccgcagaccgaagcgatcgtgatgatcggtgagatcggcggtagcgctgaagaagaagcagctgcgtacatcaaagagcacgttaccaagccagttgtgggttacatcgctggtgtgactgcgccgaaaggcaaacgtatgggccacgcgggtgccatcattgccggtgggaaagggactgcggatgagaaattcgctgctctggaagccgcaggcgtgaaaaccgttcgcagcctggcggatatcggtgaagcactgaaaactgttctgaaataaatatctgtaataagaaatagccctcgccgcttccctctacaggaatggcgaagggctgtcggtttcgacatggttggccatcgtatgatggccttttttgtgcttatcggctactttttcgctgcgctatcagggtaaatttatagtcatcggtattaaaagcgttgcggctatattcaaacacccgaccatcaactaaatatccacggcttactttttcaagaatcggctttgtctggctgatattaagcagacggctcatctcttcggttggcatcagaggaatgatttcctgttcgctacgatcgataaccattttcttcacttcttcgataaagtgatatttgctattttccatgacctgccaggtgagatccgggaacaacgcaagcggcatccaggtttcttccagcgccattggcttttgcttgcgatagcgcacgcgcttcacatgccacacacgatcctgcggggtgatttgtagctgttgctgaagaaaatcgtcagccggaatcacttcgaatatcagaacttcactgtgtgtatcgacgtgacggtcgctcagtttttcatcaaaactggttaactgaaaaatatcgtaattgacccgctcttctttgacgtaagtcccgctgccctgaatgctttcgaggatctgctgctcgactagctggcgcaaagcctgacgcaccgtaacccggctgacgccaaactctgtttgtagcgcactttcagtgggtaacgcatcgccaggtttaagctcgccacgcgcaatttgttcacgaatgcgatcggcaatctgccggtataagggcttgtgtcccatttttagtatctcattaatacgaatttaaccattatgcccgataaattcatcctgtaaataatacaaatacaatacaaataatttcaatcaagtgaaattgatcacataatggtattgttttatcgggcacactggcgcgactataaaaacgatcaagtgaggatcatgatgaatctgacgactctgacccaccgcgatgcgttgtgtctgaatgcgcgctttaccagccgtgaagaggccatccacgcgttgactcaacgtcttgctgctctggggaaaatttccagtactgagcaatttctggaagaagtgtatcgccgtgaaagccttggcccgaccgccttaggtgaagggttggctgtgccgcatggcaaaactgctgcggtaaaagaagcggcgtttgcggtcgccacactcagcgagccgcttcagtgggaaggcgttgatggcccggaagcagttgatttagtggtgctgctggcgattccccccaatgaagcgggtactacgcatatgcaactgctgacagcgctgaccacgcgccttgcggatgatgagattcgggcgcgtatacagagcgcgacgacgcctgatgagttgctcagcgcgctggatgacaagggaggcacgcaaccttctgcctctttttccaacgcgccaactatcgtctgcgtaacggcctgtccggcgggtattgctcacacctatatggctgcggaatatctggaaaaagccggacgcaaactcggcgtaaatgtttacgttgaaaaacaaggcgctaacggcattgaagggcgtttaacggcggatcaactcaatagtgcaaccgcctgtatttttgcggctgaagtcgccatcaaggagagtgagcgttttaatggcattcccgcgcttagtgtgcctgttgccgagccgattcgccatgcagaagcgttgatccaacaagcgcttaccctcaagcgtagcgatgagacgcgtaccgtacagcaagatacgcaaccggtgaaaagtgtcaaaacggagctgaaacaggcactgttgagcggaatctcttttgccgtaccgttgattgtcgcggggggcacggtgctggcggtcgcggtattactgagccaaatcttcgggctacaagatctgtttaatgaagaaaactcctggctgtggatgtaccgcaagctgggcggcgggctgctcggaattttgatggtaccggtgctcgcggcctataccgcctattctctggcagataaaccggcgttagcgccaggctttgcggctggacttgccgccaacatgatcggctccgggtttctcggcgcggtcgttggcggattgatagccggttacttgatgcgctgggtgaaaaatcacttgcgtcttagcagtaaattcaatggattcctgactttttatctctacccggtgctcggtacgttgggagcgggcagtctgatgctgtttgtggtgggggaacctgtcgcctggatcaataacagccttaccgcctggctgaacggtctgagtggaagtaacgcgctgttgctgggtgccattctcggttttatgtgttcctttgaccttggagggccagtgaataaagccgcttatgcattctgcctgggcgcaatggcgaacggcgtttacggcccgtatgccattttcgcctccgtcaaaatggttagcgcatttaccgtaaccgcttccacgatgctcgcaccgcgcctgtttaaagagtttgaaattgagaccgggaaatccacctggctgttagggctggcaggtattaccgaaggggcgatcccgatggcgattgaagatccgctgcgggttattggtagctttgtgctgggctctatggtaacgggcgctattgtcggtgcgatgaatatcggccttagcacacccggtgccggcattttcagcctctttttacttcatgataatggcgcgggcggtgttatggcggcaattggctggtttggcgcggcattggtgggggctgcaatcagcactgcaattctcctgatgtggcggcgtcacgcggttaagcatggcaactatctgactgatggcgtaatgccataaacaaaaaggaaacgacgatgaaagcagtatctcgcgttcacatcaccccgcatatgcactgggatcgagagtggtatttcaccaccgaagagagtcgtattctgctggtcaataatatggaagagatcctgtgccgactggaacaggacaacgaatacaaatattacgtactcgacgggcaaacggcgatcctcgaagattatttcgcggtgaaaccggaaaacaaagaccgtgtgaagaaacaggtagaagccggcaagttgattatcggcccctggtatacccagaccgataccacgattgtttctgcggaatccatcgtccgtaatctgatgtacggaatgcgtgactgcctcgcgtttggcgagccgatgaaaataggttatttaccagattcctttggcatgtccgggcaactgccgcatatctacaatggatttggcattacccgcaccatgttctggcgcggatgtagcgagcgccacggtactgataaaaccgagtttttgtggcaaagcagtgacggtagcgaagtgacggcgcaggtgctgccgctgggctacgccatcggtaagtacttacctgccgacgaaaacggattacgtaaacgcctcgacagttattttgacgtgctggaaaaagcgtctgtaaccaaagagattttgctgccgaatgggcatgaccagatgccattgcagcaaaatatcttcgaagtgatggataagctacgtgagatctaccctcaacgtaagtttgtgatgagccgctttgaagaggtatttgagaagatcgaagcgcagcgagataatctggcaaccctgaaaggggaatttattgatggcaaatatatgcgcgtgcatcgcaccatcggttctacgcgtatggatatcaaaattgcccacgcgcgtattgaaaataagattgttaatctgctggaaccgctggcaacactggcctggacgttgggttttgaataccaccacggcttgctggagaaaatgtggaaagagatcttaaaaaatcatgcccacgacagtatcggctgctgctgtagtgacaaagttcatcgcgaaatcgtcgcccgcttcgaactggctgaagacatggcggataatctgattcgtttctacatgcgcaaaattgccgacaacatgccgcagagcgacgccgacaaactcgtcctgtttaacctgatgccctggccgcgtgaagaagttatcaacaccactgtgcggctgcgcgccagccagtttaatttgcgggacgatcgcggtcagcctgtaccgtattttattcgccatgcccgtgagatcgatccaggcctaatcgatcggcaaatagttcattacggtaattacgatccctttatggagtttgatatacagatcaaccagattgtcccttctatgggctatcgcacgctttatatcgaagcgaatcagcctggcaacgtaattgcggcaaaaagtgacgctgaagggatactggaaaatgctttctggcaaattgcgctcaatgaggatggttctctgcaactggtagataaagacagcggtgtgcgctatgaccgggtattgcaaattgaagaaagctctgatgatggtgatgaatatgactatagtcccgcaaaagaagagtgggtaattaccgcagcgaacgcgaaaccgcaatgcgatattattcatgaagcctggcagagcagggctgttatccgctatgacatggcagtgccgctcaatttgagtgaacgcagcgcccggcaatccactggcagagtaggggtggtgttggttgtcactcttagtcataacagcaggcgtattgatgtggatatcaatcttgataaccaggctgacgatcatcgccttcgtgtcctggtccctacaccttttaacaccgacagtgttctggcagatacgcagtttggtagcctaacgcgccccgtgaacgacagtgcaatgaacaactggcagcaagaaggctggaaagaagcgccggttccggtatggaatatgctcaactatgttgccttacaggaagggcgtaacggcatggctgtctttagcgaagggttacgtgaatttgaagtcatcggtgaagagaagaaaacctttgccattacgttgctgcgtggcgtgggcttactgggcaaagaagatctgcttttaaggcctgggcggcctagcggaattaaaatgccagtcccggacagtcaactacgtggtctgctttcttgtcgcctaagtttattgagttataccggtacgccaaccgccgctggtgtagctcagcaggcgcgagcatggctgactccagtacagtgttacaacaaaatcccatgggatgtgatgaagctcaacaaagccggattcaacgtgccggaaagttatagtttgttgaaaatgcccccagtgggatgcctgataagcgcacttaagaaagctgaagaccgacaagaagtgattttacggctgtttaatccggctgaaagtgcaacctgtgatgcgactgttgctttcagtcgcgaggtgatttcttgcagtgaaacgatgatggatgaacacattaccaccgaggaaaatcaaggtagtaatctaagcgggccttttttacccggccagagtcggacgttcagttaccggcttgcctgaatagcaatcaaaccgaagccacatatgcgcggccagattgttgacaaagggcgctttgttcatgccggatacggcatgaacgctttattcggtctacaaaagcaggcaaattcaatatattgcagagatgatgtagacactggcaagcgtagcgcatcaggtaattttgcgtttatcttcactctcaagccacgtatatgtggctttatttttaacaaaataataaccctgggtgagttaattataatataattataagttaactaaatgttaatattggcggggtggatttatgcctttattagtaatcctgaaactctgcgtcgtattagccagtgaccaaaaaaagaattaaggtcaaccgtgctgtttttgcttcgtctctttttatctttaattgccaaccgaaactaatttcagccttataactcacacattttaaacataaatgtcactaaagttaccttattgaaacatgattaacataatttgtaggaattgatatttatcaatgtataagtcttggaaatgggcatcaaaaagagataaattgttctcgatcaaattggctgaaaggcggtaatttagctataaattgatcaccgtcgaaaaatgcaaatttgcttcaacaaaaacctgtttattgtaaggattttgcggcgtaatatatacgtgggatcaatttgagtttttattaacatgtttgcaacctttctttacgccgtttttgtgtgcattcacatggtatgatgaaagtgttcaaacaaatttctattggggcatgcgtgtgaccctttctaacggggttcactctcggagtcttcatgcgatgagcaaggagtcatgatgttagatatagtcgaactgagccgcttacagtttgccttgaccgcgatgtaccacttcctttttgtgccactgacgctcggtatggcgttcctgctggccattatggaaacggtctacgtcctctccggcaaacagatttataaagatatgaccaagttctggggcaagttgtttggtatcaacttcgctctgggtgtggctaccggtctgaccatggagttccagttcgggactaactggtcttactattcccactatgtaggggatatcttcggtgcgccgctggcaatcgaaggtctgatggccttcttcctcgaatccacctttgtaggtctgttcttcttcggttgggatcgtctgggtaaagttcagcatatgtgtgtcacctggctggtggcgctcggtagtaacctgtccgcactgtggattctggttgcgaacggctggatgcaaaacccaatcgcgtccgatttcaactttgaaactatgcgtatggagatggtgagcttctccgagctggtgcttaacccggttgctcaggtgaaattcgttcacactgtagcgtctggttatgtgactggcgcgatgttcatcctcggtatcagcgcatggtatatgctgaaaggtcgtgacttcgccttcgctaaacgctcctttgctatcgctgccagcttcggtatggctgctgttctgtctgttattgttctgggtgatgaatccggctacgaaatgggcgacgtgcagaaaaccaaactggctgctattgaagccgagtgggaaacgcaacctgcgcctgctgcctttactctgttcggcattcctgatcaggaagaggagacgaacaaatttgcgattcagatcccttacgcactgggcatcattgcaacgcgttccgtggataccccggttatcggcctgaaagagctgatggtgcagcatgaagaacgcattcgtaacgggatgaaggcgtactctctgctcgaacaactgcgttctggttctaccgaccaggcggttcgtgaccagttcaatagcatgaagaaagacctcggttacggtctgctgctgaaacgctatacgccaaacgtggctgatgcgactgaagcgcagattcaacaggcaaccaaagactccatcccgcgtgtagcgccgctgtactttgcgttccgtatcatggtggcgtgtggcttcctgcttctggcaatcatcgcgctctctttctggagtgtcatccgcaaccgcattggcgagaaaaaatggcttctgcgcgccgcgctgtacggtattccgctgccgtggattgctgtagaagcgggctggttcgtggctgaatatggccgccaaccgtgggctatcggtgaagtgctgccgacagctgtggcgaacagcagtctgaccgcaggcgatctcatcttcagtatggtgctgatttgcggcctgtataccctgttcctggtggcagaattgttcttaatgttcaagtttgcacgcctcggcccaagcagcctgaaaaccggtcgctatcactttgagcagtcttccacgactactcagccggcacgctaagacaggagtcgtcaaatgatcgattatgaagtattgcgttttatctggtggctgctggttggcgttctgctgattggttttgcagtcactgacggtttcgacatgggggtgggcatgctcacccgtttcctcggtcgtaacgacaccgagcgtcgaattatgattaactccattgcaccacactgggacggtaaccaggtttggctgatcaccgcgggcggcgcactctttgctgcctggccgatggtctatgccgctgcgttctccggcttctatgtggcgatgatcctcgtgctggcgtctttgttcttccgtccggtcggttttgactaccgctccaagattgaagaaacccgctggcgtaacatgtgggactggggcatcttcattggtagcttcgttccgccgctggtaattggtgtagcgttcggtaacctgttgcagggcgtaccgttcaacgttgatgaatatctgcgtctgtactacaccggtaacttcttccagttgcttaacccgttcggcctgctggcaggcgtggtgagcgtagggatgatcattactcagggcgcaacctatctgcaaatgcgtaccgtgggcgaactgcacctgcgtacccgtgcaacggctcaggtggctgcgctggtgacactggtctgtttcgcactggctggcgtatgggtgatgtacggtatcgatggttatgtcgtgaaaagcacaatggaccattacgcagcctctaacccactgaataaagaagtggttcgtgaagctggcgcatggctggttaacttcaacaacacgccaattctgtgggctattccggcactgggtgtggttctgccgctgctgaccatcctgactgcacgtatggataaagccgcgtgggcgtttgtgttctcctccctgacgctggcctgcatcatcctgacagccggtatcgcaatgttcccgtttgtgatgccgtccagcaccatgatgaacgcaagtctgacaatgtgggatgcaacttccagccagctgacgcttaacgtcatgacctgggttgcggtggttctggtaccgatcattctgctctacaccgcctggtgttactggaaaatgttcggtcgtatcaccaaagaagatattgaacgtaacacccactctctgtactaagtaaggagctaaaaatgtggtatttcgcatggattctgggaacgcttcttgcctgtagctttggggtaatcaccgcgctggcgcttgaacacgtcgaaagtggcaaagccggtcaagaagacatctgatgagtaagattatcgcgactttgtatgcggtaatggacaagcgccccctgcgggcgctttccttcgtgatggcgcttctgttagcaggatgtatgttttgggacccatctcgttttgccgcgaagaccagtgaactggaaatctggcatggtttattgctgatgtgggccgtctgtgctggtgtgattcacggcgtgggctttcgtccgcagaaggttctttggcaagggattttttgcccattgcttgccgatattgttctcattgtcgggctgattttcttcttcttttaaatcagaattctctttaaaaaattatgggccgctccaggcccataaatttttacgctcccttaacttgccctcattcccaaacctcaatcgcgcgcgtatagtagcagcgtttaaaagctctaacttttgttgcattaccgggatgtaaagtgaatacaacgctgtttcgatggccggttcgcgtctactatgaagataccgatgccggtggtgtggtgtaccacgccagttacgtcgctttttatgaaagagcacgcacagagatgctgcgtcatcatcacttcagtcagcaggcgctgatggctgaacgcgttgcctttgtggtacgtaaaatgacggtggaatattacgcacctgcgcggctcgacgatatgctcgaaatacagactgaaataacaagtatgcgtggcacctctttggttttcacgcaacgtattgtcaacgccgagaatactttgctgaatgaagcagaggttctggttgtttgcgttgacccactcaaaatgaagcctcgtgcgcttcccaagtctattgtcgcggagtttaagcagtgactgacatgaatatccttgatttgttcctgaaggctagccttctggttaaacttatcatgttgattttgattggttttagtatcgcatcttgggccattattatccagcggacccgtattcttaacgcagcggcgcgcgaagccgaagcgtttgaagataaattctggtctggaatcgaactctctcgcctctatcaagagagccaggggaaacgggataatctgactggtagcgaacaaatcttttacagcgggttcaaagagtttgtgcgcctgcatcgtgccaatagccatgcgccggaagccgtagtggaaggggcgagccgtgctatgcgtatctccatgaaccgtgaacttgaaaatctggaaacgcacattccgttcctcggtacggttggctccatcagcccgtatattggtctgtttggtacggtctgggggatcatgcacgcctttatcgccctcggggcggtaaaacaagcaacactgcaaatggttgcgcccggtatcgcagaagcgttgattgcgactgcaattggtctgtttgccgctatcccggcagttatggcctacaaccgcctcaaccagcgcgtaaacaaactggaactgaattacgacaactttatggaagagtttaccgcgattctgcaccgccaggcgtttaccgttagcgagagcaacaaggggtaagccatggccagagcgcgtggacgaggtcgtcgcgatctcaagtccgaaatcaacattgtaccgttgctggacgtactgctggtgctgttgctgatctttatggcgacagcgcccatcatcacccagagcgtggaggtcgatctgccagacgctactgaaagtcaggcggtgagcagtaacgataatccgccagtgattgttgaagtgtctggtattggtcagtacaccgtggtggttgagaaagatcgcctggagcgtttaccaccagagcaggtggtggcggaagtgtccagccgtttcaaggccaacccgaaaacggtctttctgatcggtggcgcaaaagatgtgccttacgatgaaataattaaagcactgaacttgttacatagtgcgggtgtgaaaagcgttggtttaatgacgcagcctatctaaacatctgcgtttcccttgcttgaaagagagcgggtaacaggcgaacagtttttggaaaccgagagtgagtaaggcaaccgaacaaaacgacaagctcaagcgggcgataattattagtgcagtgctgcatgtcatcttatttgcggcgctgatctggagtagcttcgatgagaatatagaagctagtgccggaggcggcggtggtagctccatcgacgctgtcttggttgatagtggtgcggtagttgagcagtacaaacgcatgcaaagccaggaaagtagcgcgaagcgttctgatgaacagcgcaagatgaaggaacagcaggctgctgaagaactgcgtgagaaacaagcggctgaacaggaacgcctgaagcaacttgagaaagagcggttagcggctcaggagcagaaaaagcaggctgaagaagccgcaaaacaggccgagttaaagcagaagcaagctgaagaggcggcagcgaaagcggcggcagatgctaaagcgaaggccgaagcagatgctaaagctgcggaagaagcagcgaagaaagcggctgcagacgcaaagaaaaaagcagaagcagaagccgccaaagccgcagccgaagcgcagaaaaaagccgaggcagccgctgcggcactgaagaagaaagcggaagcggcagaagcagctgcagctgaagcaagaaagaaagcggcaactgaagctgctgaaaaagccaaagcagaagctgagaagaaagcggctgctgaaaaggctgcagctgataagaaagcggcagcagagaaagctgcagccgacaaaaaagcagcagaaaaagcggctgctgaaaaggcagcagctgataagaaagcagcggcagaaaaagccgccgcagacaaaaaagcggcagcggcaaaagctgcagctgaaaaagccgctgcagcaaaagcggccgcagaggcagatgatattttcggtgagctaagctctggtaagaatgcaccgaaaacggggggaggggcgaaagggaacaatgctagccctgccgggagtggtaatactaaaaacaatggcgcaagtggggccgatatcaataactatgccgggcagattaaatctgctatcgaaagtaagttctatgacgcaagctcctatgcaggcaaaacctgtacgctgcgcataaaactggcacccgatggtatgttactggatatcaaacctgaaggtggcgatcccgcactttgtcaggctgcgttggcagcagctaaacttgcgaagatcccgaaaccaccaagccaggcagtatatgaagtgttcaaaaacgcgccattggacttcaaaccgtaatcgcgatgttgactgttcggacggtcaacatcaggcaccggttgccacggggttctggtagttttgtgtattttagtttgttaacattctgctaaattatcgtgggccatcggtccagataagggagatatgatgaagcaggcattacgagtagcatttggttttctcatactgtgggcaagtgttctgcatgctgaagtccgcattgtgatcgacagcggtgtagattccggtcgtcctattggtgttgttcctttccagtgggcggggcctggtgcggcacctgaagatattggcggcatcgttgctgctgacttgcgtaacagcggtaaatttaatccgttagatcgcgctcgtctgccacagcagccgggtagtgcgcaggaagtacaaccagctgcatggtccgcactgggcattgacgctgtagttgtcggtcaggtcactccgaatccggatggttcttacaatgttgcttatcaacttgttgacactggcggcgcaccgggtactgtacttgctcagaacagctacaaagtgaacaagcagtggctgcgttatgctggtcataccgccagtgatgaagtgtttgaaaaactgaccggcattaaaggtgcgttccgtactcgtattgcctacgttgttcagaccaacggcggtcagttcccgtatgaactgcgcgtatctgactatgacggttacaaccagtttgtcgttcaccgtagtccgcagccgctgatgtctccggcgtggagtccagacggttctaaactggcttatgtgaccttcgaaagcggtcgttccacgctggttattcagacgctggcaaatggcgctgtacgtcaggtggctagtttcccgcgtcacaacggtgcacctgcattcagcccagacggcagcaaactggcattcgccttgagcaaaaccggtagtctgaacctgtacgtaatggatttggcttctggtcagatccgccaggtgactgatggtcgcagtaacaataccgaaccgacctggttcccggatagccagaacctggcatttacttctgaccaggccggtcgtccgcaggtttataaagtgaatatcaacggcggtgcgccacaacgtattacctgggaaggtagccagaaccaggatgcggatgtcagcagcgacggtaaatttatggtaatggtcagctccaatggtgggcagcagcacattgccaaacaagatctggcaacgggaggcgtacaagttctgagctccacgttcctggatgaaacgccaagtctggcacctaacggcactatggtaatctacagctcttctcaggggatgggatccgtgctgaatttggtttctacagatgggcgtttcaaagcgcgtcttccggcaactgatggacaggtcaaattccctgcctggagcccgtatctgtgataataattaattgaatagtaaaggaatcattgaaatgcaactgaacaaagtgctgaaagggctgatgattgctctgcctgttatggcaattgcggcatgttcttccaacaagaacgccagcaatgacggcagcgaaggcatgctgggtgccggcactggtatggatgcgaacggcggcaacggcaacatgtcttccgaagagcaggctcgtctgcaaatgcaacagctgcagcagaacaacatcgtttacttcgatctggacaagtacgatatccgttctgacttcgctcaaatgctggatgcacatgcaaacttcctgcgtagcaacccgtcttacaaagtcaccgtagaaggtcacgcggacgaacgtggtactccggaatacaacatctccctgggtgaacgtcgtgcgaacgccgttaagatgtacctgcagggtaaaggcgtttctgcagaccagatctccatcgtttcttacggtaaagaaaaacctgcagtactgggtcatgacgaagcggcatactccaaaaaccgtcgtgcggtactggtttactaagagaattgcatgagcagtaacttcagacatcaactattgagtctgagcttactggttggtatagcggccccctgggccgcttttgctcaggcaccaatcagtagtgtcggcagtggcagcgtcgaagaccgcgtcactcaacttgagcgtatttctaatgctcacagccagcttttaacccaactccagcaacaactttctgataatcaatccgatattgattccctgcgtggtcagattcaggaaaatcagtatcaactgaatcaggtcgtggagcggcaaaagcagatcctgttgcagatcgacagcctcagcagcggtggtgcagcggcgcaaagtaccagcggcgatcaaagcggtgcggcggcaagtacgacgccgacagctgatgctggtactgcgaatgctggcgcgccggtgaaaagcggtaatgcaaacacggattacaatgcagctattgcgctggtgcaggataaatcccgccaggatgacgcaatggtggcatttcagaatttcatcaaaaattaccctgatagtacttacctgccaaacgccaattattggctgggtcagttaaactacaacaagggtaaaaaagatgatgcggcgtactattttgctagcgtagtgaaaaactatccgaagagtccaaaggctgcagatgcgatgtttaaagtcggcgtcatcatgcaggacaaaggtgacaccgcaaaagcgaaagccgtataccagcaggttatcagtaaataccctggtactgatggcgctaaacaggcacaaaaacgtctgaacgcgatgtaatgcataacacacgaccagaagtcgcattatttctggtcgtgtcgtgcgaatcataagcagttgagtgatctacatcgaaatttttgttgcgctcaagtctgaaatcagtaatatatgccgccgttgccacgggatatcaaacaaaccgaaagcaacgaaaaagtgggtcgttagctcagttggtagagcagttgacttttaatcaattggtcgcaggttcgaatcctgcacgacccaccaatcgctaaggtggaagcggtagtaaaacgtgaaggataacgttgcatgagcaacggcccgaagggcgagacgaagtcgagtcatcctgcacgacccaccactaacatagttagttgtagtatccagcgtagtatcgggtgattagctcagctgggagagcacctcccttacaaggagggggtcggcggttcgatcccgtcatcacccaccaccgggtcgttagctcagttggtagagcagttgacttttaatcaattggtcgcaggttcgaatcctgcacgacccaccagttttaacatcgaagacagatgttaagcgtgtaggataacgttgcgtcagcaacggcccgtagggcgagcgaagcgagtcatcctgcacgacccaccactaatgacggtgggttcggtggaagtagtttgtagtatccagcgcagtatcgggtgattagctcagctgggagagcacctcccttacaaggagggggtcggcggttcgatcccgtcatcacccaccactcgggtcgttagctcagttggtagagcagttgacttttaatcaattggtcgcaggttcgaatcctgcacgacccaccagttttaacatcaaactcagatgttaagcgtgaaggataacgttgcgccagcaacggcccgtagggcgagcgaagcgagtcatcctgcacgacccaccaatcttaaagattggccccgagtaaaaatctttcaggtaacacccgtatgggtcgttagctcagttggtagagcagttgacttttaatcaattggtcgcaggttcgaatcctgcacgacccaccaatttaaaggtggttactggtagagaacgtgaaggataacgttgcgttagcaacggcccgaagggcgagacgaagtcgagtcatcctgcacgacccaccatcctgaatgattaaggcagcataatcccgcaaggggtcgttagctcagttggtagagcagttgacttttaatcaattggtcgcaggttcgaatcctgcacgacccaccaatgtaaaaaagcgccctaaaggcgcttttttgctatctgcgatactcaaagattcgaacctgcagcaggtttgagttgagcgcagcgaaacaacggagccgctcgcggcgacggcccgaagggcgagcgaagcgagtcatcctgcacgacccaccaatgtaaaaaagcgccctaaaggcgcttttttgctattcaggcatcctcaatttcactttgtaaacctgatgacatcgtcagagcttactgtgcaagcaactctatgtcggtggaattaggcgtaaaatgacgcatcctgcacattaggcgtaattcgagtgacttttccccaccattcgactatcttgtttagcatataaaacaaattacaccgataacagcgaatattacgctaatgtcggttttaacgttaagcctgtaaaacgagatggtaagatgagcgtaatgtttgatccagacacggcgatttatcctttccccccgaagccgacgccgttaagcattgatgaaaaagcgtattaccgcgagaagataaaacgtctgctaaaagaacgtaatgcggtgatggttgcccactactataccgatcccgaaattcaacaactggcagaagaaaccggtggctgtatttctgattctctggaaatggcgcgcttcggtgcaaagcatcccgcttctactttgttagtcgctggggtgagatttatgggagaaaccgccaaaattctcagtccggaaaaaacaattctgatgccgacacttcaggctgaatgtagtctggatctcgactgccctgttgaagaatttaacgcattttgcgatgcccatcccgatcgtactgtcgtcgtctacgccaacacttctgctgcggtaaaagcgcgcgcagattgggtggtaactagtagcattgccgtcgaacttattgatcatcttgatagtttgggtgaaaaaatcatctgggcacccgacaaacatctggggcgttacgtgcaaaaacagacgggtggagacattctatgctggcagggtgcctgtattgtgcatgatgaatttaagactcaggcgttaacccgcttgcaagaagaatacccggatgctgccatactggtgcatccagaaagtccacaagctattgtcgatatggcggatgcggtcggttccaccagtcaactgatcgctgctgcgaaaacattgccacatcagaggcttattgtggcaaccgatcggggtattttctacaaaatgcagcaggcggtgccagataaagagttactggaagcaccaaccgcaggtgagggtgcaacctgccgcagctgcgcgcattgtccgtggatggccatgaatggccttcaggccatcgcagaggcattagaacaggaaggaagcaatcacgaggttcatgttgatgaaaggctgcgagagagggcgctggtgccgctcaatcgtatgctggattttgcggctacactacgtggataacgaataataaggcgtaacgttacgctttgggggaaagatggatttttttagtgtgcagaatatcctggtacatataccaataggggcaggcggttatgatctcagttggatcgaagcggtaggcacgatcgccgggttgctgtgtattggccttgccagtctggagaagatcagcaactacttctttggcctgatcaacgtcaccttgtttggcattattttctttcagattcagctgtatgccagcctgctattacaggtgtttttctttgccgcgaatatttacggttggtatgcgtggagccgacaaaccagtcagaacgaggcggagttgaaaattcgctggttgccattgccgaaggcactcagctggttggcggtttgcgttgttagcattggtctgatgacggtatttatcaatccggtgtttgcatttttgacccgcgtggcagtcatgatcatgcaagcattaggattacaggttgtgatgcctgaactgcaaccggacgctttcccgttctgggatagttgcatgatggtgttatctatcgtggcaatgattctgatgacgcgtaagtatgtggaaaactggctgttgtgggtgattattaacgtgattagcgtcgttatttttgcacttcagggcgtttacgccatgtctctggagtacatcatcctgacctttattgcgctcaacggcagccggatgtggatcaacagcgcacgtgaaagaggcagtcgcgcgctgtcccattaatggtgatgatgactatggccagacaccccttcattcaggtggcagtctggcccatgacaaggttgatattccatctgaatggtggcgtgctcaatctgatagtgatccatcaggtagtgttggatctgatccaacaaggcatcgtgatcgtgtggcgggatcacctgcacatgcaacgtcatcaccggcttctcgcctaccatccatacatgtacatggtgcacattgcggacttccgggatttcccggcacatacgacgcttcagttcagcgatatccaggcttaccggtgcaccttcaagtaattcattcacgctatctttcaacagtcgccacgcgctacgcagaaccagaaggctcaccagtatgctgagaatggggtcagcaggtgtccagccagtccagataataatcaacgcggcaataatagccccaacgctacccagcaggtccccgagcacatgcagtgccgctgctcgtacgttgaggtttttctcttcgctgccgtgatgaagtaaccagaaagaaagtatatttgccagcaacccagccacggcaattgccatcatcatgccgccctcgaccggacgcggcgtgcggaagcgttctatcgcctcccagacaatcaaaatggtaattaccacgagggctatggcattcacaaacgccgcgagcgtggtcagtcttagccaaccgaaagtgtggcgaatggtgggaggacgacgactaaattgcacggcgagtagggcgaaaagcagggcggcagtatcggtcaacatatgacccgcatcggccagcaatgccagagaaccagaaagaaaaccaccaacgacttctaccagcataaacccggcagtcacgccgaaagcatacaacaagcgacgagcattattatcttctggcaggtgactggacgtgtgactgtgactgtgcgccatgacgagtcatcccttaattattctcacttaactttatgacatcatactgcttttagaagtgaaaaattaaaagggagagactccgctctcccattattggctattttgcagggttactgcgtggtaccgtcggttttggtatcgacatcattattgatgccatcaccggtttgtacctttttattgatatccggacagcgaccatctttgcacatggtgttcttgtgctcttcatctttggtcattccgtcattgttcatactagaaccatcgctatgcagcattgtgccgccagaaccggtatttaccccgttattgtcgacgttatttggcgcgacattttcacgggcgtcaggggctacctggcccgcatcagctgcggcgtttgcctggccgttattagtttgcgctccgctatcggcagccagtgcggcaccgctggcaaggcttagagtggcagtcagaaataatgtggccagttttgtcattttcataggatgctcctgttatggtcgttatgtcggataacctcttccaacagtgcatttgcaggtgaatataaggcattggtttaagatttcagccaggttatgaaacgcagcagagaatcttgaaataattaacaaacaaaggagttacagttagaaattgtaggagagatctcgtttttcgcgacaatctggcgtttttcttgctaattccaggattaatccgttcatagtgtaaaaccccgtttacacattctgacggaagatatagattggaagtattgcattcactaagataagtatggcaacactggaacagacatgaattatcagaacgacgatttacgcatcaaagaaatcaaagagttacttcctcctgtcgcattgctggaaaaattccccgctactgaaaatgccgcgaatacggttgcccatgcccgaaaagcgatccataagatcctgaaaggtaatgatgatcgcctgttggttgtgattggcccatgcagtattcatgatcctgtcgcggcaaaagagtatgccactcgcttgctggcgctgcgtgaagagctgaaagatgagctggaaatcgtaatgcgcgtctattttgaaaagccgcgtaccacggtgggctggaaagggctgattaacgatccgcatatggataatggcttccagatcaacgacggtctgcgtatagcccgtaaattgctgcttgatattaacgacagcggtctgccagcggcaggtgagtttctcgatatgatcaccccacaatatctcgctgacctgatgagctggggcgcaattggcgcacgtaccaccgaaagccaggtgcaccgcgaactggcaagtgggctttcttgtccggtcggcttcaaaaatggcaccgacggtacgattaaagtggctatcgatgccattaatgccgccggtgcgccgcactgcttcctgtccgtaacgaaatgggggcatagcgcgattgtgaataccagcggtaacggcgattgccatatcattctgcgcggcggtaaagagcctaactacagcgcgaagcacgttgctgaagtgaaagaagggctgaacaaagcaggcctgccagcacaggtgatgatcgatttcagccatgctaacagctccaaacaattcaaaaagcagatggatgtttgtgctgacgtttgccagcagattgccggtggcgaaaaggccattattggcgtgatggtggaaagccatctggtggaaggcaatcagagcctcgagagcggggagccgctggcctacggtaagagcatcaccgatgcctgcatcggctgggaagataccgatgctctgttacgtcaactggcgaatgcagtaaaagcgcgtcgcgggtaaggtttaattgtcggatgcgccgtcagagtggcgtatccgatgaatcaccacaggcctgataagtcgcgcagcgtcgcatcaggcaatgtgctccattgttagcaacaaaaaagccgactcacttgcagtcggctttctcattttaaacgaatgacgtttacttcgctttaccctggtttgcaaccgccgctgctttcgctgcgatctcgtcagcattacccagataatagcgtttcagcggtttgaaattctcgtcgaactcatacaccagcggcacgccagtcgggatattaagctcaagaatctcttcttcgctcatgttatcaagatatttcaccagcgcacgtaaagagttaccgtgtgcagcgatgatcacgcgctcaccgctcttcatacgcggcagaatagtttcattccagtaagggatcacgcggtcaatggtcagcgccaggctttccgtcagcggcagttctttctcgctcagtttcgcgtaacgcggatcgtgacccggataacgctcatcatctttagtcagttccggcggagtcactgcaaaaccacgacgccactgtttcacctgctcgtcgccatacttttcagcagtttccgctttgttcagaccctgcaacgcaccgtagtgacgttcgttcagtttccaggatttctcaacgggcagccatgcctgatccagttcgtccagcacattccacagggtatggatagcgcgtttcagcacagaagtgtaagcaaagtcaaagctgtaaccttcctctttcagcagcttacctgctgcttttgcttcgcttacgcctttctcagacagatccacgtcgtaccaaccggtgaaacggttttctttgttccactgactttcgccatgacgaaccagaaccagcttagttacagccatatacttactcctcaaatcatcttttaatgataataattctcattatattgccgcgacgaagcaacagcaatgcttacgcataaccatagcgaaaatagtggcgcagtgtaaggttgttgtgaatattgagttgcaaatatgtcggtgtttgctggtgatttgaacaatatgagataaagccctcatgacgagggcgtaacattactcagcaataaactgatattccgtcaggctggaatactcttcgccaggacgcaggaagcagtccggttgcggccattcagggtggttcgggctgtccggtagaaactcgctttccagagccagcccttgccagtcggcgtaaggttcggttccccggctcggtgtgccgccgaggaagttgccggagtagaattgcagagccggagcggtggtgtagaccttcagctgcaatttttcatctgcactccagacatgcgccgccactttcttgccatcgcctttggcctgtaacaagaatgcgtgatcgtaacctttcactttgcgctgatcgtcgtcggcaagaaactcactggcgatgattttggcgctgcggaaatcaaaagacgttccggcgacagatttcaggccgtcgtgcggaatgccgccttcatcaaccggcagatattcgtccgccagaatctgcaacttgtgattgcgcacgtcagactgctcgccgtcaagattgaaatagacgtgattagtcatattcaccgggcaaggtttatcaactgtggcgcgataagtaatggagatacggttatcgtcggtcagacgatattgcaccgtcgcgccgagattacccgggaagccctgatcaccatcatcactactcagggcaaacagcacctgacgatcgttctggttcacaatctgccagcgacgtttgtcgaacccttccggcccgccgtgcagctggttaacgccctgacttgggctaagcgtcacggtttcaccgtcaaaggtataacggctattggcgatacggttggcataacgaccaatagaggcccccagaaacgcggcctgatcctgatagcattccgggctggcacagccgagcagcgcctcgcggacgctgccatcggaaagcggaatacgggcggaaagtaaagtcgcaccccagtccatcagcgtgactaccatccctgcgttgttacgcaaagttaacagtcggtacggctgaccatcgggtgccagtgcgggagtttcgttcagcactgtcctgctccttgacttggtttacaaacgtaaaaagtctctttaatacctgtttttgcttcatattgttcagcgacagcttgctgtacggcaggcaccagctcttccgggatcagcgcgacgatacagccgccaaatccgccgccggtcatgcgtacgccacctttgtcgccaatcacagctttgacgatttctaccagagtgtcaatttgcggcacggtgatttcgaaatcatcgcgcatagaggcatgagactccgccatcaactcgcccatacgtttcaggtcgccttgctccagcgcgctggcagcttcaacggtgcgggcgttttcagtcagtatatgacgcacgcgttttgccacgatcgggtccagttcatgcgcaacagcgttgaactcttcaatggtgacatcacgcagggctggctgctggaagaaacgcgcaccggtttcgcactgttcacgacgggtgttgtattcgctgccaaccagggtacgtttgaagttactgttgatgatgacgacagccacacctttgggcatggaaactgctttggtccccagactgcggcaatcgatcagcaaggcatgatctttcttgccgagcgcggaaattagctgatccatgatcccgcagttacagcctacaaactggttttctgcttcctgaccgttaagcgcgatttgtgcgccgtccagcggcagatgataaagctgctgcaatacggttccgaccgcgacttccagactagcggaagaacttaacccggcaccctgcggcacattgccgctgatcaccatgtccacgccgccgaagctgttgttacgcagttgcagatgtttcaccacgccacgaacgtagttagcccattgatagttttcatgtgcgacaatgggcgcatcgagggaaaactcgtcgagctgattttcataatcggctgccatcacgcgaactttacggtcatcgcgtggtgcacaactgatcacggtttgataatcaatcgcgcagggcagaacgaaaccgtcgttgtagtcggtgtgttcaccaatcaaattcacgcggccaggcgcctgaatggtgtgagtggcagggtagccaaatgcgttggcaaacagagattgtgttttttctttcagactcatttcttacactccggattcgcgaaaatggatatcgctgactgcgcgcaaacgctctgctgcctgttctgcggtcaggtctcgctgggtctctgccagcatttcataaccaaccataaatttacgtacggtggcggagcgcagcagaggcggataaaagtgcgcgtgcagctgccagtgttgattctcttcgccattaaatggcgcgccgtgccagcccatagagtaggggaaggagcactggaagaggttgtcataacgactggtcagctttttcaacgccagcgccagatcgctgcgctgggcgtcggtcaaatcggtgatccgtaaaacgtgggctttgggcagcagtagcgtttcgaacggccaggcagcccagtaaggcacgacggctaaccagtgttcggtttcgacaacggtacggctaccgtctgccagctcgcgctgaacataatccaccagcattggacttttctgttcggcaaaatattctttttgcaggcggtcttcgcgctcagcttcgttaggcaggaagctatttgcccaaatctgaccgtgcggatgcgggttagagcagcccatcgccgcgcctttgttttcaaaaacctgcacccatgggtacgttttccccagttctgcggtttgctcctgccaggttttgacgatttccgtcaatgctgcaacgctgagctctggcagcgttttactgtgatccggactaaagcagatcacccggctggtgccgcgcgcgctctggcaacgcatcagcggatcgtgactttctggcgcatctggcgtgtcagacatcaaagccgcaaagtcattagtgaaaacgtaagtcccggtgtaatcggggtttttatcgcctgtcacccgcacattacctgcgcagaggaagcaatctggatcgtgcgcaggtaacacctgtttggctggcgtttcctgcgccccctgccaggggcgcttagcgcggtgcggactaaccagaatccattgcccggtgagcgggttgtagcggcgatgtggatgatcaacgggattaaattgcgtcatggtcgttccttaatcgggatatccctgtggatggcgactctgccagtgccaggtgtcctgcgccatttcatcgagtgtgcgcgttacgcgccagttcagttcacggtcggctttgctggcgtccgcccagtaggccggaaggtcgccctcgcgacgcggtgcaaaatgataattaaccggtttgccgcaggctttgctgaaggcattaaccacgtccagcacgctgttgcctacgccagcgccgaggttgtagatgtgtacgcctggcttgttcgccagtttttccatcgccacgacgtgaccgtccgccagatccattacgtggatgtaatcgcgtacgccagtaccatcttcggtcggataatcgttaccaaaaatcgccaggctgtcgcgacggcctacagcaacctgggcgatgtatggcatcaggttattcggaatgccttgcggatcttcgcccatatcgccgctcggatgcgcgccaaccgggttgaagtagcgcagcagggcaatgctccagtccggctgggctttttgcagatcggtgaggatctgttccaccatcagcttgcttttgccgtaagggctttgcggtgtgccggtcgggaagctttcaacgtatggaattttgggctgatcgccataaacggtggcggaggagctaaaaataaagtttttgacgttagcggcgcgcatggcgctaatcaggcgcagagtgccgttgacattgttgtcgtaatattccagcggtttttgtacgctttcgcccacggctttcagcccggcgaagtggatcacggtgtcgatagcgtgatcgtgcaggatctcggtcatcaacgcttcgttacgaatatcgccttcaacaaacgttggatgtttgccgcctaaacgctcgataacaggcagtacgatgcgcttactgttacagaggttatcaagaatgatgacatcatgaccgttttgcagtaattgcacacaggtatgacttccaatgtaaccgctaccaccggtaaccagaactctcataattcgctccattaggcttatggtatgaaataaccatagcataacaaagatgcgaaaagtgtgacatggaataaattagtggaatcgtttacacaagaatttagccgttttttatgcgcgattaagtgattataaaacagagggtttatgaatgattgcgctttttatctgaaaaaagacgcggtttcatgcctgcatgcgtcgaaccgttggccggagagggtgctaaggccgcctccggcaaggtcagcactaccgactcaatatatttttgtcagcacatagcgatagagtccaccgtccggcacgaactcaagacgatgggtaatacaggcaggcgcatcttcagcgtggtggctaacaaacaacaattgcgtttcaccttcgctaatcagcacatcaacaaaacggcggataagctggcgattcagcggatcaagcccctgtagtggttcatcgagaataagcaacgtcggatgtttcaccagtgcgcggacaatcagcgccagacgctgctgtccccaggaaagactatggaacggagcgtcagccgtgcgtttatcaatgccgagaatatccagccactgctgcaccagtttttgctggcgatcgctaacggcctgataaatgccaatgctatcaaaatagccagaaagaatcacattacgcacggtagtgctgacccggtaatccagatgcaaactactgctgacgtaaccgatatgctttttgatatcccagatggtttcgccgctgccgcgacgtcgtccgaaaagcgtcaaatcgttgctgtaaccttgcggatgatcgccagtaaccaggcttaataacgtgctttttcctgcaccatttggcccgacaatttgccagtgttcgcctggattcacctgccagctaaggttattaagaatggggcgatcgttataagaaaccacgccattgttcagcacaatgcgcggttcgttggcgggtaaggcgtgacgtgcactaggttcatccggctccggcagttgcacaccttcaagctgttcactatgcgccagttgcgcgacgagtgcttgttggagcagttcctctttagcgccagtttccgctaacgtgcaatccgccagcacgccagcaaactggacaaactccgggatctcatcgaagcgattgagcaccagtaccagagtaataccggactgatgtaagctggcgagtcgctcagccagctgctgacgactggcaacatccaggccatcgaacggctcatcaagaatcaacaagtcaggctcgctcatcagcgcctgacacagcagggtttttcgcgtctcgccagtggaaaggtatttaaagcgtcggtcgaggagggcggtaataccgaactgctgcgccagttgcatgcaacgcggtgcatcctttacttcatcctgaatgatctcagccgtagtgcgtccggtgtcatcttcgccagggccgagcatatcggtgttattccgctgccattcgtcgctgacgagtttttgcaattgctcgaaggagagacgagtgatgtgggaaaactggctttgccgttcacctttcaaaagcggaagttcccccgccagcgcgcgggccagggcgcttttcccgcttccattgctaccgacaaacgcccaactatcacccgcgtttaacgttagctgaggcaattgcagcgtttttgtgtcgctaagacgaaacgtgccttgcaaaatttgcaagctactcattttatatcccactttgtgcagcgattactgacagggatacgtgtttcataacaaattgtcaacacgcttagcacagcgtggcgataatcacgctgtcggcattaaagtaggccgtgacattctgtccttgctgaagagaagtcgcttcatttaccggcactgtggcgcacagtgtttgcccgtcgggtagcgccattaatacttcgcactgctctgcgccgcgctcaatatgactaataatacccggtaattggttgtcagcgttttgcgcgaccgcctcgtcctgagtaatacctacccacggcgcttttagcaatatcaacacttctttgccttcatccagccccagacgcgcgccgctttgtgcggtaattgcgactttcaggcgtgtttttccgtcagccagtaagacatcaacatgctgttgaacgtcatcatgatcgcgggcggtgatggtaccgaaccactggttacgggcgctggtttgcagactaaaacgactgatcgcggccagcaggctgttcagcggcagggcgtcatcgtcacttaacacatcaaaggctttttgctggatttgcgccagtaagtcatagagctgaatcagtcgctgaccatagcgggtcagtactgcgccgccgccacctttaccgcctgttgcgcgctcgaccagaatatgctcacttaactgattcatctcgttaatggcatcccaggcgcttttatagctaataccggcatctttcgctccctggctaatggaaccggaaagcgcaatgtgttttagtaggctaatgcggcgcgggtcggcgaataatttttgttggagcttaagggtgagaaggatttcggcctgcataacaatgtcctggcaaaagtcttattgtgacggaaaacgaacgccacgcaaagctgaccgcacaaaaggggagtgcttttctgtgcttagcggttagaatagtctcatgactatatctggagttgaccatgttagagttattaaaaagtctggtattcgccgtaatcatggtacctgtcgtgatggccatcatcctgggtctgatttacggtcttggtgaagtattcaacatcttttctggtgttggtaaaaaagaccagcccggacaaaatcattgattccctgaatgcccgcttagtcgggcattttctttttctcaacttcctgcttttcctgccgatattttttcttatctacctcacaaaggttagcaataactgctgggaaaattccgagttagtcgttatattgtcgcctacataacgttacattaaggggttaccaatggctcgtaaatggttgaacttgtttgccggggcggcactctctttcgctgttgctggcaatgcactggcagatgaagggaaaatcacggtgttcgccgccgcaagtctgactaacgcaatgcaggacattgctacgcagtttaaaaaagagaaaggcgtggatgtggtttcttctttcgctagcagttctactctcgcccgtcagattgaagcgggtgcgcctgcggatctgtttatttctgccgatcagaaatggatggattatgcggttgataaaaaagcgatcgatacagctacgcgtcagacactgctcggcaatagcctggtcgttgtagcaccgaaagccagcgtgcagaaagatttcaccatcgacagcaaaaccaactggactagtctgctgaatggcggtcgcctggcggttggcgatccggaacatgttcccgctggcatttatgcaaaagaagcactgcaaaaactgggcgcatgggatacgctctctccgaaactggccccagcggaagatgttcgtggggcgctggcgctggtcgaacgtaacgaagcgcctctgggcattgtctacggttctgacgcagttgccagcaaaggggtaaaagtggttgccaccttcccggaagatagtcataaaaaagtggaatatccggttgctgttgtggaagggcataacaatgcgacagtgaaagcattttatgattatctgaagggaccgcaggcagcggaaatctttaaacgttacggatttacaatcaagtaatgatactgaccgatccagaatggcaggcagttttattaagcctgaaagtttcttccctggctgtgctgtttagcctgccgtttgggatcttttttgcctggttactggtgcgttgcacgtttccgggcaaagctctgctcgacagcgtactgcatctaccgctggtgttaccgcccgtggtcgtcggttacttattattagttagcatgggacggcgcggatttatcggtgaacgtctgtatgactggtttggtattaccttcgcctttagctggcgcggcgcggttctcgctgccgccgtcatgagctttccgctgatggtgcgggcaattcgtctggcgctggaaggggttgatgtcaaactggaacaggccgcaagaacactgggggccgggcgctggcgcgttttctttactatcacgttaccgctgaccttaccgggaattattgttggtacggtactggcttttgctcgttctctcggtgagtttggtgcaaccatcacctttgtgagcaacattcctggtgaaacgcgaaccattccttctgccatgtataccctgatccagacccccggcggggaaagtggagcggcgagactgtgcattatttctattgcgctggcgatgatctccctgttgattagtgaatggctggccagaatcagccgtgaacgggcggggcgctaatcatgctggaactgaatttttcccagacgttgggcaaccattgcctgactattaatgaaacgctgcccgccaatggcatcactgctatctttggcgtctccggtgccggaaaaactagcctgattaacgccatcagtggactgacgcgcccgcaaaaagggcggattgtcctcaatgggcgggtactaaatgatgccgaaaaaggtatctgcctgacgccggaaaagcgtcgcgttggctatgtttttcaggatgcgcggctgttcccgcattacaaagtgcgtggcaatctgcgctacggcatgagcaaaagtatggtcgatcagttcgataagctggtggcgcttttaggcattgaaccgttgcttgaccgtttaccaggcagcctgtccggaggcgaaaaacagcgcgtggcgattggtcgggctttgctgacagcaccggaattgctgttgctggatgaaccgctggcgagtctggatattccgcgtaaacgcgaactgttgccttatctgcaacggctgacacgggaaatcaacattccgatgttgtatgtcagccatagcctggatgagatcctccatctggcagacagagtgatggtactggaaaacggtcaggtgaaagcctttggcgcgctggaggaagtgtggggcagtagcgtgatgaatccgtggctgccgaaagagcaacaaagtagcattctgaaagtgacggtgcttgagcatcatccgcattacgcgatgaccgcgctggcgctgggcgatcagcatttgtgggtcaataagctggacgaaccgctgcaagctgcgctacgtatccgcattcaggcttccgatgtttctctggttttacaaccgccgcagcaaaccagcattcgtaacgtattgcgggcaaaagttgttaatagttatgacgacaacggccaggtggaagtggaactggaagtcggcggtaaaacgctgtgggcgcgtatcagcccgtgggccagggatgaactggcgatcaaacctggcctgtggctgtacgcgcaaattaaaagtgtgagcataaccgcctgattaaatcaggtggctataaatgaactgggcaatgctgtcggtggtgttatcaccaatcacaatgttggcgcgcgcttttaccgcgtcatcggcgttgcccatcgccacgcctgtaccagcggcttccagcatactgatatcattaaagttatcgccgaatgccacgacgttttccatgctccaaccttgcgcctcaacccatttcgtcaaacgtttacctttgctgttgccgccgcgtgcaatatcaacctgatcgtgccaggaccattcacactccagtcccagttcatgttcgacatgcttaccaaaatgctgcaattgcggcaggtcatcgtgcgtcagggcgaacttccatacggcgttaacttgttgcgccgtttcagccagagaagcgacttgtgtgaaagtcggacgctgttccggcggcagggtttgcgcccagttagatgtgcgaatgacatgcccggtcgggtgctcatagaccattgcatcatcgacatacatcagaccgtgaatgtggtgttcattcagcatctcaatgagttgcagggctttaataacgggcattgggtccgcttccagcacggtttttgcatgataatcatacaaataggtgccattacagcaaatagcaggtgtatccagcgccagcgcctgataaaaaggatgaatagcgacgtgatggcgacctgtgacgatgattaattgatagcctgcttcgcgagcgcgggccagggcttctatgctactaggaagcagggtctttttcggggtcaataaggtgccgtctaagtcgagagcaatcacgcgtgtggtcatggcgtattccagattaaggttaagaattttcgtctgcgcgaatggtacaccgataccactatcggacaaaattctgcgttttaattcagcattcaccgccaaaagcgactaattttagctgttacagtcagttgctaaatgcaaaggagcattcatgaagcaaacagtttatatcgccagccctgagagccagcaaattcacgtctggaatctgaatcatgaaggcgcactgacgctgacacaggttgtcgatgtgccggggcaggtgcagccgatggtggtcagcccggacaaacgttatctctatgttggtgttcgccctgagtttcgcgtcctggcgtatcgtatcgccccggacgatggcgcactgacctttgccgcagagtctgcgctgccgggtagtccgacgcatatttccaccgatcaccaggggcagtttgtctttgtaggttcttacaatgcgggtaacgtgagcgtaacgcgtctggaagatggcctgccagtgggcgtcgtcgatgtggtcgaggggctggacggttgccattccgccaatatcagtccggacaaccgtacgctgtgggttccggcattaaagcaggatcgcatttgcctgtttacggtcagcgatgatggtcatctcgtggcgcaggaccctgcggaagtgaccaccgttgaaggggccggcccgcgtcatatggtattccatccaaacgaacaatatgcgtattgcgtcaatgagttaaacagcagtgtggatgtctgggaactgaaagatccgcacggtaatatcgaatgtgtccagacgctggatatgatgccggaaaacttctccgacacccgttgggcggctgatattcatatcaccccggatggtcgccatttatacgcctgcgaccgtaccgccagcctgattaccgttttcagcgttagcgaagatggcagcgtgttgagtaaagaaggcttccagccaacggaaacccagccgcgcggcttcaatgttgatcacagcggcaagtatctgattgccgccgggcaaaaatctcaccacatcagcgtatacgaaattgttggcgagcaggggctactgcatgaaaaaggccgctatgcggtcgggcagggaccaatgtgggtggtggttaacgcacactaaccgctgatttacccggcgcagtctctcctgcgccggtgtattaacctatctcctgtaacgcgtgtctctggcgttcgacgatattggtccacaaattgtctttatcgtcagtccataaattaatcagcaaggcaaaaaagcgttctgctgctggagaaagtacggcatctttacggcgaattattcccaatgttcgacgtataacgggttccaccaatgggataccaataatgctagaatagggcgcatgaggcattgccaggccaggaagcgcgctaatccccagtcccgcctccaccagtcctaaactcgtgctaagatgacgcacttcgtaaaaccagtccagcttccagggcttgtcggccagctgttgttctatcaacagtcggttgccgctggaggagcgtacgccaatcattttgtaacccactaactcctgccattctacaagctgctttttggccaatggatggtcacgccgacaggccagcacgaacggctcgttgaccagtggggtaaaatcaatggaactatttgtgacgttgttcatgtttatgccaaagtcactttcgttacacagcacgctttccatgcaattattcgtgccttgttccagaatccgcactttaatattgggatacagctcattaaatttaccgattgccagcggtaaaaaataaaatactgcggtcggaatacacgctaacgtcaccataccacgatgataagcattcatatcacgaatattaaaaagcgtttcatcgaatttctttattaattcccgcgcctccgggagcaacctttttcctgcttttgttaacgtaaccttgcgagttgtacgctcaaatagttgaacatgtaaatcttcctccatcttttttattcttcgcgttaatgcaggttgcgtaatattgagtaatttagcggcattgttaaagctactggactctgccagtatgacaaatgccttcatactacttaattcatgcttcattattactccggaaaatggaaggctgctttttgggtggctggccgttaaaaattttaactgcatttagccaacttaaattaatgaaaaaatgttattaatcgttgagctaaagtcattagagatgctttgcccttaatgtaaccatatcgcaataagttatgtttttaaattgagggcattattatgaaaaaaataccctgcgtgatgatgcgaggtggaaccagcaggggcgcgttcctgttagcggaacatttacccgaagatcaaacgcagcgcgataaaatattgatggcaattatgggttccggtaacgatctggaaattgacggtattggcggcggtaatccactgaccagtaaagtcgccattattagccgttccagcgatccgcgtgctgatgtcgattatctgtttgcgcaggtaatcgttcatgagcaacgtgtcgataccacgcctaactgcggcaatatgctgtctggtgttggggcattcgccattgaaaatggtttgattgcagcgactagcccagttactcgcgtacgtatccgcaacgtcaatacgggtacgttcatcgaagctgatgtgcaaacgccaaatggtgttgtcgagtacgagggtagcgccagaattgacggcgtaccgggtactgccgcaccggttgcgctcactttcctgaatgccgctggaaccaaaaccggaaaagttttcccgactgataatcagattgattattttgacgatgtcccggtgacctgtatcgatatggcgatgccagtcgtcattattccggctgaatatctgggaaaaacaggttatgaattaccggcggaactggatgccgacaaagcattattagcccgcattgaatctatccgtctacaagcgggtaaagcaatgggcttaggtgatgtcagtaatatggttatccctaaacctgtgcttatttctccagcgcagaaaggcggggcaattaatgtgcgttattttatgccgcattcttgccatcgcgcgctggcgataaccggtgctattgctatttccagtagttgtgcattggaaggcaccgtcacccgacaaatcgtcccttctgtaggatacggcaatatcaatattgaacaccccagtggtgcgctcgacgttcatttaagtaatgaaggtcaggatgccacgacgttacgcgcatctgttattcggacgaccagaaaaatattttccggtgaagtttatcttccctgaaaaaattcgttgtcaggataaggacaatcaataaaggacttctgtatgagtcatacagaaagaacaggattttaaatgaataagaaaagcttatggaagctaattctgatattagcgatcccatgtattattggttttatgccagctccggcaggattaagcgaactggcgtgggtgctttttggtatttacctggcggccattgtggggctggttatcaagcctttcccggaacctgtcgtactgttaattgccgttgctgccagtatggtggtggtcggtaacttatccgacggtgcgtttaaaaccaccgccgtattaagcggttactctagtggtaccacctggctggtgttcagcgcgtttaccttaagcgccgcatttgtgaccaccggtttaggtaaacgtattgcctatctgctgattggtaaaatcggtaacaccacgctgggtctgggttacgttacggtattcctcgatctggtactggctccggcaacaccgtctaacaccgcgcgtgcgggcggcattgtgttaccgatcatcaacagcgtggcggtggctttggggtccgaaccggaaaaaagtccgcgtcgtgtcggacattacctgatgatgtccatttacatggtcaccaaaaccaccagctatatgttctttaccgcaatggcggggaacattctggcgctgaaaatgatcaacgacattctgcacctgcaaattagctggggtggatgggcgctggcagccggattgccgggcatcattatgctgctggtcaccccgctggtgatttacaccatgtatccaccagaaattaagaaggtggataacaaaaccatcgctaaagcgggccttgccgaactaggaccgatgaaaatccgcgaaaaaatgctgctcggtgtctttgtgctggcgctgctgggctggattttcagtaagtctctgggggttgatgaatccaccgtggcaatcgttgttatggcaaccatgctgctgctgggtatcgttacctgggaagacgtggttaaaaataaaggcggctggaataccttaatctggtacggcggtattatcggcttaagctccttattaagcaaagttaaattcttcgaatggttagctgaagtctttaaaaataacctggcatttgatggtcacggtaacgttgctttcttcgttattattttcctcagcattatcgtgcgttatttcttcgcttccggtagtgcctatatcgttgctatgttaccggtatttgccatgctggcgaacgtctccggcgcaccgttaatgttaaccgcgctggcactgttgttctccaactcctatggcggcatggttactcactatggcggcgcggcaggtccggtcatctttggcgtgggttataacgatattaaatcctggtggttggtcggtgcggtactgacgatattaaccttcctggtgcatatcaccctcggcgtgtggtggtggaatatgctgatcggctggaacatgctgtaaatattctcgtcatacttcaagttgcatgtgctgcgtctgcgttcgctcaccccagtcacttacttatgtaagctcctggggattcactcgcttgtcgccttcctgcaactcgaattatttagagtatatccatttattatctttctgcgcacttcacggtgcgcagatatctggagcatttgatgatcaagttatctgaaaaaggcgtgtttctcgccagtaataacgaaataattgccgaagaacatttcaccggcgaaattaaaaaagaagaagccaaaaaaggcactattgcctggtctattctctctagccataatacgtccggaaatatggataaacttaaaattaagtttgatagtttagcctctcacgatattacctttgttggtattgtacagaccgctaaagcgtccggtatggaacgtttcccgctgccgtatgtgctgaccaactgccataacagtctctgcgccgtcggcggcactattaacggtgatgaccatgtttttggtttaagcgcggcccagcgttatggcggtatttttgtgcctccgcatattgcggtcatccatcaatatatgcgtgagatgatggcaggcggcggcaaaatgatcctcgggagtgacagccacacccgttacggtgcattagggacaatggcagtcggtgagggcggcggtgagttggtaaaacagctgcttaatgacacctgggatatcgactatccgggcgtggttgcggtgcatctgaccggaaaacctgcgccgtatgtggggccacaggatgtggcgctggctatcattggcgcggtgttcaaaaacggttacgtcaaaaacaaagtcatggagttcgttggaccgggcgttagcgcgctctctaccgatttccgtaacagcgttgacgtgatgaccactgaaacgacctgtttaagttctgtctggcaaaccgatgaagaagtccataactggctggcgctgcacggtcgcggccaggattactgccagcttaaccctcaaccgatggcgtactacgatggctgcatcagcgttgatttaagcgccatcaaaccaatgattgcgctgccgttccacccgagcaacgtgtatgaaatcgacacactgaaccagaacctgaccgacattctgcgtgagattgaaattgagtccgaacgcgtggcgcacggtaaagccaaactcagcctgctggataaagtggaaaatggtcgcctgaaagtgcagcaggggattatcgcgggctgttctggcggtaactacgaaaacgtcatcgcggcggcgaatgcactgcgcggtcaatcctgtggcaatgacaccttcagcctggcagtttacccgagtagtcagccggtgtttatggatctcgccaaaaaaggtgtggtagcagatttgattggcgcaggcgcaatcatcagaaccgcgttctgcggcccatgctttggcgcgggcgatacgccaatcaacaacggtttgagtattcgccacaccacgcgtaacttcccgaaccgcgaaggctctaagccagctaatgggcagatgagtgcggtggcgttgatggacgctcgttctatcgctgcgactgcggcaaacggtggctatttaacctctgccagcgaacttgattgctgggacaacgtgccggagtacgccttcgatgtaacgccgtataaaaaccgtgtttatcagggctttgtgaaaggggcaactcagcaaccgctgatttacgggccgaacattaaagactggccggaattgggtgcgctgactgacaatatcgtcctgaaagtgtgcagcaagatcctcgacgaagtgaccaccaccgacgaactgattccttccggtgaaacctcttcttatcgtagtaatccgattggtctggcggagtttaccctgtctcgccgcgatcccggttatgttagcagaagtaaagcgactgctgagctggaaaatcagcgtctggcggggaatgtcagcgagctgacagaggtgtttgcgcgcattaagcagattgctggtcaggagcatattgatccgctgcaaactgaaattggcagcatggtctatgcggtgaaaccaggcgatggttctgcgcgtgaacaggcggcgagctgccagcgtgtgattggcggtctggcgaatattgccgaggagtacgcgactaaacgctatcgttctaacgtcatcaactgggggatgttaccgctgcaaatggcggaagtaccaacctttgaagtgggggattacatttacatccctggcattaaagcggcgctggataatccgggtacgacgtttaaaggttatgtgatccatgaagatgcgccggtaacggaaattacgctctatatggaaagtctgactgctgaagagcgcgagattatcaaggcgggtagtttgattaacttcaataaaaaccgtcagatgtaaaaagcgccatgtgaatgtaggtcgcattcggcacttattgtcggatgcgatgcttgcgcatcttatccgacctacgaatcgcatcgaatctgtaggccagataaggcattttcgcagcatccggcacttattgtcggatgcgatgcttgcgcatcttatccgacctacaaatcgcatcgaaccgtaggccggataaggcgtttacgccgcatccggcaaatagttaattgcccttacttcttcgcctctgcaaccactttactacccacgccgcggttattgtattcccacatgcggttgtagttagtgtcattcagattgcgctgtatttcgtcgttatcatctacgctgccggtattacccgcaaacggacgattagagatcaccgcatcggcccacggtttagccgtgttaaaaccttcgttgatggcgctatcacggatcaccacctgaccgttggtattggcatcaacatccaggctgcggcccagttgcgccacaccatcaccgaaagcattgaaacggctgtttacggcgaggaaaccgtagtaaatgttggacagcgtagccggtgcaaacacatacgcttcttgctgagtacgactgttcaccacgcggaattcggtgttatcgaacaccactgcgccgcgaccagaaacgatatccacatccccttcaatgtagctgttggtcaccagcgtacgcggctgacgattcgtttccagacggttctgcacaccgctgttggtgacaaagaaggtgttctgacgaccgagaatgttaacgttgttaatctgtacctggtcaccatcagtacgcagtgccaccgccggatggttacctgcatctacgctatcgcccagcgtgttttcgatggtcagattttgcagttgcaggccattgttttgactccagaagaccgcagagcagagaacaccgatactgtcgctgcgtttgctctggcagctatcgtacatataccacgctggtttacctggcatatatttgccgcgcgggttgacgtcgtgacgccagtcggcagggctcatgccaccattaagggaaagcccaatcttcacatcaatcggtttttcacctgtaccgtacagagtaattccacccggagcggcagggacatataccgttccctgatactcaccaggcatcacggcaatatactggcgcttgttggtacgcttgataattgccgcatctaccgccgcctgaatcgtggtatgcgttacaccttgagtgcccgccgggccgacaacaaagtcaggttgcgcaggcagggtaatcggggaaggattccacgctgcagcacctggtgtcagggatgcaaaatagtgttgagcatcgaaattctgcgcttcttttgcgctcagaatcgggcgagaagaggtaccaggcgcggtttgatcagaaggacgttgatcgggcggggtactgctacaggcggtcagcgtcacgccaaaagccaatgccagcgccagacgggaaacactaaatgtgttcacaggttgctccgggctatgaaatagaaaaatgaatccgttgaagcctgcttttttatactaacttgagcgaaacgggaaggtaaaaagacaaaaagttgtttttaatacctttaagtgataccagatggcattgcgccatctggcagagtgattaactaaacatcgcagtaatgctggcgcttgccagagagtggaaatgaacgttaaacccgaccatcgcgccgctggcaccttcatcgatatcaatacgttctatatccagcgcgtgaacggtaaaaatgtagcgatgagtttcgcctttcggcggtgctgcgccatcgtacccggttttaccaaagtcggtacgcgtctgcaaaacgccgtctggcattgctaccagaccagagccaaacccttgcggtaatacgcgggtatcagcgggtaagttaacaactacccagtgccaccagccggagccggttggcgcatccgggtcgtagcaggtgacaacaaaacttttcgttcccgcaggaacatcatcccacgccagatgcggactaatattatcgccatcgtaacccatgccgttaaagacatgacgatgcggcaatttatcgccatcgcgcagatcgttactgatgagtttcatgaaccctcctttcttgtttgcagaaagtgtagccagaaaccctcacgcggacttctcgttattggcaaaaaaatgtttcatcctgtaccgcgcggttaaccgctgcggtcagacgctgcaactgttgcgggagaataatatagggcggcatcaggtaaatcagtttgccaaaaggccggatccagacaccctgttcgacaaagaatttttgcagcgccgccatattcaccggatgagtggtttcgaccacgccaatggcccccagtacgcgcacatcggcaaccatttcggcatcacgggcgggggcaagttgctcgcgcagctgtacttcaatatccgccacctgttgctgccagtcgccagattcgagaatcgccaggctggcgtttgctgccgcgcaggccagcggattgcccataaaagttggcccatgcataaagcaaccggcttcaccgttactgatggtttctgcaacctcgcgcgtggtgagtgtggcggaaagggtcattgtgccgccggttaaggctttaccgaggcacaaaatgtccggcgcgatttctgcatgttcacaggcaaacagtttcccggtacgaccaaatccagtggcgatctcgtcggcaatcagcaagataccttcgcgatcgcatattttgcggattcgttttaaccattccggatggtacatgcgcatcccgcctgcgccctggacaatcggctcaatgatcaccgccgcgatttcatgacgatgcgccgccatcaggcgggcaaagcccaccatatcgcgctcatcccattcgccatccatgcggctttgcggggcgggagcaaacaggttttctggcaggtagcctttccacagactgtgcatactgttatccggatcgcacacgctcatcgcgccaaaggtatcgccatgataaccattgcggaaggtcagaaaacgctggcgcgcttcgcctttggcttgccagtactgcaacgccattttcatcgccacttccaccgctacggaaccggagtccgcgagaaaaacgcactccagcggttgcggcgtcatcgccaccagtttgcggcacagctcaatggctggcgcatgggtgataccgccaaacatcacatggctcatggcatcaatttggctcttcatcgccgcattaagctgcgggtgattgtagccgtggatcgccgcccaccaggagctcataccgtcaaccaggcgtctgccgtcagacaaaatcagctcgcaaccttcggcgctcaccaccggataaaccggcagaggggaggtcatggatgtgtatgggtgccagatatggcgttggtcaaaggcaagatcgtccgttgtcataatcgacttgtaaaccaaattgaaaagatttaggtttacaagtctacaccgaattaacaacaaaaaacacgttttggagaagccccatggctcaccgcccacgctggacattgagccaagtcacagaattatttgaaaaaccgttgctggatctgctgtttgaagcgcagcaggtgcatcgccagcatttcgatcctcgtcaggtgcaggtcagcacgttgctgagcattaagaccggagcttgtccggaagattgcaaatactgcccgcaaagcagccgctacaaaaccgggctggaagccgagcggttgatggaagttgaacaggtgctggagagcgcgcgcaaagcgaaagcggcaggaagcacgcgcttctgtatgggcgcggcgtggaagaatccccacgaacgcgatatgccgtacctggaacaaatggtgcagggggtaaaagcgatggggctggaggcgtgtatgacgctgggcacgttgagtgaatctcaggcgcagcgcctcgcgaacgccgggctggattactacaaccacaacctggacaccagcccggagttttacggcaatatcatcaccacacgcacttatcaggaacgcctcgatacgctggaaaaagtgcgcgatgccgggatcaaagtctgttctggcggcattgtgggcttaggcgaaacggtaaaagatcgcgccggattattgctgcaactggcaaacctgccgacgccgccggaaagcgtgccaatcaacatgctggtgaaggtgaaaggcacgccgcttgccgataacgatgatgtcgatgcctttgattttattcgcaccattgcggtcgcgcggatcatgatgccaacctcttacgtgcgcctttctgccggacgcgagcagatgaacgaacagactcaggcgatgtgctttatggcaggcgcaaacagcattttctacggttgcaaactgctggccacgccgaatccggaagaagataaagacctgcaactgttccgcaaactggggctaaatccgcagcaaactgccgtgctggcaggggataacgaacaacagcaacgtcttgaacaggcgctgatgaccccggacaccgacgaatattacaacgcggcagcattatgagctggcaggagaaaatcaacgcggcgctcgatgcgcggcgtgctgccgatgccctgcgtcgccgttatccggtggcgcaaggagccggacgctggctggtggcggatgatcgccagtatctgaacttttccagtaacgattatttaggtttaagccatcatccgcaaattatccgtgcctggcagcagggggcggagcaatttggcatcggtagcggcggctccggtcacgtcagcggttatagcgtggtgcatcaggcactggaagaagagctggccgagtggcttggctatagccgggcactgctgtttatctctggtttcgccgctaatcaggcagttattgccgcgatgatggcgaaagaggaccgtattgctgccgaccggcttagccatgccagtttgctggaagctgccagtttaagcccgagccagcttcgccgttttgctcataacgatgtcactcatttggcgcgattgcttgcttccccctgtccggggcagcaaatggtggtgacagaaggcgtgttcagcatggacggcgatagtgcgccactggcggaaatccagcaggtaacgcaacagcacaatggctggttgatggtcgatgatgcccacggcacgggcgttatcggggagcaggggcgcggcagctgctggctgcaaaaggtaaaaccagaattgctggtagtgacttttggcaaaggatttggcgtcagcggggcagcggtgctttgctccagtacggtggcggattatctgctgcaattcgcccgccaccttatctacagcaccagtatgccgcccgctcaggcgcaggcattacgtgcgagcctggcggtcattcgcagtgatgagggtgatgcacggcgcgaaaaactggcggcactcattacgcgttttcgtgccggagtacaggatttgccgtttacgcttgctgatagttgcagcgccatccagccattgattgtcggtgataacagccgtgcgttacaactggcagaaaaactgcgtcagcaaggctgctgggtcacggcgattcgcccgccaaccgtacccgctggtactgcgcgactgcgcttaacgctaaccgctgcgcatgaaatgcaggatatcgaccgtctgctggaggtgctgcatggcaacggttaataaacaagccattgcagcggcatttggtcgggcagccgcacactatgagcaacatgcagatctacagcgccagagtgctgacgccttactggcaatgcttccacagcgtaaatacacccacgtactggacgcgggttgtggacctggctggatgagccgccactggcgggaacgtcacgcgcaggtgacggccttagatctcagcccgccaatgcttgttcaggcacgccagaaggatgccgcagaccattatctggcgggagatatcgaatccctgccgttagcgactgcgacgttcgatcttgcatggagcaatctcgcagtgcagtggtgcggtaatttatccacggcactccgcgagctgtatcgggtggtgcgccccaaaggcgtggtcgcgtttaccacgctggtgcagggaagcttacccgaactgcatcaggcgtggcaggcggtggacgagcgtccgcatgctaatcgctttttaccgccagatgaaatcgaacagagcctgaacggcgtgcattatcaacatcatattcagcccatcacgctgtggtttgatgatgcgctcagtgccatgcgtagcctgaaaggcatcggtgccacgcatcttcatgaagggcgcgacccgcgaatattaacgcgtagccagttgcagcgattgcaactggcctggccgcaacagcaggggcgatatcctctgacgtatcatctttttttgggagtgattgctcgtgagtaaacgttattttgtcaccggaacggataccgaagtggggaaaactgtcgccagttgtgcacttttacaagccgcaaaggcagcaggctaccggacggcaggttataaaccggtcgcctctggcagcgaaaagaccccggaaggtttacgcaatagcgacgcgctggcgttacagcgcaacagcagcctgcagctggattacgcaacagtaaatccttacaccttcgcagaacccactagcccgcacatcatcagcgcgcaagagggcagaccgatagaaagtttggtaatgagcgccggattacgcgcgcttgaacaacaggctgactgggtgttagtggaaggtgctggcggctggtttacgccgctttctgacactttcacttttgcagattgggtaacacaggaacaactgccggtgatactggtagttggtgtgaaactcggctgtattaatcacgcgatgttgactgcacaggtaatacaacacgccggactgactctggcgggttgggtggcgaacgatgttacgcctccgggaaaacgtcacgctgaatatatgaccacgctcacccgcatgattcccgcgccgctgctgggagagatcccctggcttgcagaaaatccagaaaatgcggcaaccggaaagtacataaaccttgccttgttgtaaccattctgtatttggttaaattgcgagcgagatcgcgtcttcgattgactgcaatttaaccaattaaattctaaaataatcacgaaaaaaattttacttccgcctcatgcggcgaatgtgggaattgcccaggcggcgggggataggggctggagacagttatccactattcctgtggataaccatgtgtattagagttagaaaacacgaggcaagcgagagaatacgcggcttgcacgcgaattggcgttaaagacggctcaaagaaatatcttttattttttaactggttagataaatgcaatggcagtcactgaacaggcatctcttgccataaaactgtcatcactcatcttgacaaatgttaaaaaagccgttgctttggggataacccggtaaggccggagttttatctcgccacagagtaaattttgctcatgattgacagcggagtttacgctgtatcagaaatattatggtgatgaactgtttttttatccagtataatttgttggcataattaagtacgacgagtaaaattacatacctgcccgcccaactccttcaggtagcgactcatgagtaaaccgttcaaactgaattccgcttttaaaccttctggcgatcagccagaggcgattcgacgtctcgaagaggggctggaagatggcctggcgcaccagacgttacttggcgtgactggcagtgggaaaaccttcaccattgccaatgtcattgctgaccttcagcgcccaaccatggtacttgcgcccaacaaaacgctggcggcccagctgtatggcgaaatgaaagagttcttcccggaaaacgcggtggaatatttcgtttcctactacgactactatcagccggaagcctatgtaccgagttccgacactttcattgagaaagatgccagcgttaacgaacatattgagcagatgcgtttgtccgccaccaaagcgatgctggagcggcgtgatgtggttgtggtggcgtctgtttccgcgatttatggtctgggcgatcctgatttatatctcaagatgatgctccatctcacggtcggtatgattatcgatcagcgcgcgattctgcgccgactggcggagctgcaatacgctcgtaatgatcaagcattccagcgtggtactttccgcgttcgtggcgaggtgatagatatcttcccggcagaaagcgatgacattgcacttcgcgtggaactgtttgacgaggaagtggaacgattgagcttatttgacccgctgaccgggcagattgtttccactattccacgttttaccatctacccgaaaacgcactacgtcacaccgcgcgagcgcatcgtacaggcgatggaggagatcaaagaagagctggccgccagacgcaaagtgctgttggaaaacaacaaactgctggaagagcagcggctgacccagcgtacccagtttgatctggagatgatgaacgagctgggctactgtagcgggattgaaaactacagccgcttcctctccggtcgtggaccgggtgagccaccgccgacgctgtttgattacctgcctgccgatgggctgctggtcgtcgatgaatctcacgtcaccattccacaaattggcggcatgtatcgcggtgaccgggcgcgtaaagagacactggtggagtacggcttccgcctgccaagtgcgctggataaccgtccgcttaagtttgaagagttcgaagcattagcgccgcaaaccatctatgttagcgcgacgccgggtaattacgagctggaaaaatccggcggcgatgtggtggatcaggtggtgcgtccaaccggattgcttgacccgattatcgaagtgcggccggtggcgacacaggttgatgatcttcttagcgagattcgtcagcgagcggcaattaacgaacgcgtactggtcaccacactgaccaagcggatggcggaagatcttaccgaatatctcgaagaacatggcgagcgcgtgcgttatcttcacagtgatatcgacaccgtcgaacgtatggagattatccgcgacttgcgtctgggtgagttcgacgtgctggtagggatcaacttactgcgcgaaggtctggatatgccggaagtgagcctggtggcgatcctcgacgctgacaaagaaggcttcctgcgttccgaacgtagcttgatccagaccattggtcgtgcggcacgtaacgttaacggtaaagcgattctctacggcgataagatcaccccaagtatggcgaaagcgattggcgaaaccgaacgtcgccgtgagaaacagcagaagtacaacgaggaacacggaattacgccgcaaggcttgaacaagaaagtggtcgatatcctggcgctggggcagaacattgccaaaaccaaagcgaagggcagaggaaaaagccgcccgattgttgagccggataatgtgccgatggatatgagccctaaagcgttgcagcagaaaatccatgagctggaagggttgatgatgcaacacgcgcagaatctggagttcgaagaagcggcgcaaattcgtgaccagttgcatcagctgcgtgagctgtttatcgcggcaagctaacaggatagcgaagaagactgatgacaaacggaaaacagcctgatgcgctacgcttatcaggcctacattttctccgcaatatattgaatttgcgcggtttgtaggccggataaggcgttcacgccgcatccggcataaacaacgcgcactttgtcttcaataggaagccggaattttccttcggatttccgttaacctaaagcctgtaacgccttttccagcgcgttatgtaacaactggcggtcatgacgatacggaatatcgctggcctccagtacctcctggatcacaatccgctctttcaccgcgctgacatccacttttggcccgacgatgaccgcatcaatgacctttttaccaacatactgctccataattgccagcttgctttccagcttcaaattagccgcaggtaaactcaactcacgccccagattgccgatataaaccatcggcgctggcgtgcggcgtaatgcctgggcgatttccttcagcagcagaattggcatcaggctggtataaaaactgccaggcccaataatgatgagatccgcttcattgatagcgtgaaccgcctcacgcgttgcgggtacattaggcgttaacaataactcttgaatcggcgtagttaactggtcgatattgacctcgccgtaaacttcatgcccctgatcgtcaatcgccatcagatcaacaggatgctcactcattggaatcaaatgcgtatccactttcagcagattacgaattaaattgatggcttccagaggccgcacgctaaggtgatccagcgcctttaacatcaagtttccgagattatgaccggaaagttcgccattgccaccaaaacggtattcaaacatcgcggaggcgacgctcggttccgttatcagctggttgaggcagttgcgcatatcgccccaggcaatgccgccttcactacggcgaatacgccccgtgctgccaccattatcggtggtggtgacgatacccgttaaacgagaacccaaagagctaagactactgagaacgcgtcccagtccatgccctccgccgagagcaacgacacgatcaagatcagccagcgtacgattgcgcatatagtttcctggagtcagattatccgcgctacagtagcgcaaattgcggggaaacagcaattaacctgccaatattgaggatacaaactattttcttctacctctaaaggacgatgcacgctatgcctccctgatgatgtatatcaaagtaaaaccgccattttcccttattctgtagcgaaatagcacgatcatgacgctatatacatgattacatagcgaaagtgtggatggtaaaaatctcatttacacgctagtatcggcataaccactaaacactctagcctctgcacctgggtcaactgatacggtgctttggccgtgacaatgctcgtaaagattgccaccagggcgaaggaagaaatgacttcgcctcccgtatctggaaaggtgtacatggctagtcaactgactgatgcatttgcgcgtaagttttactacttgcgcctgagcattaccgatgtgtgtaactttcgttgcacctactgcctgccggatggctacaaaccgagcggcgtcaccaataaaggctttcttaccgtcgatgaaattcgccgggttacgcgcgccttcgccagactgggcaccgaaaaagtgcgcctgacaggaggagagccgtctttacgccgcgactttaccgatatcatcgccgctgtgcgggaaaacgacgctatccgccagattgcggtcacaaccaatggttaccgtctggaacgcgatgtggcgagctggcgcgatgcgggacttactggcattaacgtcagtgtcgacagtctggacgcccgccagtttcacgctattaccgggcaggataaattcaaccaggtcatggcagggattgatgctgcatttgaggccggttttgagaaggtcaaagtcaataccgtgctgatgcgtgatgttaatcatcaccagctcgacacctttctgaactggatccagcatcgccctatccagctgcgtttcatcgaactgatggaaacgggcgagggcagcgagctcttccgtaagcatcacatctctggtcaggttctgcgtgacgagctactgcgtcgcggctggatccaccaattacgtcaacgcagcgacggtcccgcgcaagtcttttgccatccagattacgccggagagattggccttatcatgccgtatgaaaaagacttctgcgccacttgcaaccgcctgcgcgtttcctccattggtaaactccatctctgcctgtttggtgaaggcggcgttaacctgcgcgatctgctggaagacgatacccagcaacaggcgctggaagcgcgtattagtgcggcgctgcgggagaagaaacagacccatttcctgcatcaaaacaacaccggtattacgcaaaacttaagctacattggcggctaaaacgtcaaaaggagagatcagatgagtcaggtaagcactgaatttatcccgacccgtattgctattcttacggtttctaatcgtcgcggtgaagaagacgatacctccggtcactatctgcgcgatagcgcgcaagaagcgggccatcacgttgtcgataaagccattgtgaaagaaaaccgctacgctattcgcgctcaggtatctgcgtggatcgccagcgacgatgtacaagtggtattgattacgggtggtactggcctgacggaaggtgatcaggctcccgaagcattgctgccgttgttcgaccgtgaagttgaaggttttggtgaagtgttccggatgttgagctttgaagagattggcacttccacgttgcaatctcgtgcggtagcgggcgtcgccaacaaaacgctgattttcgccatgccgggtagcaccaaagcgtgccgtaccgcatgggaaaatatcatcgcgccgcagctggatgcccgtacgcgtccgtgtaatttccatccacatttgaagaaataagtatgagccaactgacccatatcaacgccgctggcgaagcgcacatggtggatgtctccgccaaagcggaaaccgtgcgtgaagcgcgggcggaagcctttgtcaccatgcgcagcgagacgctggcgatgattattgatggtcgccaccacaaaggcgacgtatttgccactgcgcgtattgccggtattcaggcggcaaaacgcacctgggatctgatcccgctctgtcatccgctgatgctcagcaaagttgaagtcaatttacaggccgagccggagcacaatcgggtgcgtatagaaaccttatgccgcctgaccgggaaaaccggtgtcgaaatggaagcattaaccgcggcctccgtggcggcgctgaccatttatgacatgtgcaaagcggtgcaaaaagatatggtgattggtccggtacgtttgctggcgaagagcggcggcaagagcggtgactttaaggtggaagcggatgattaaagttctttttttcgcccaggtgcgcgagttggtgggaacagatgcaaccgaagtggctgcggatttcccaactgttgaagcgttacgccagcacatggctgcgcagagcgatcgctgggcgctggcgctggaagatggcaaattactggctgccgtcaaccagacgctggtgagttttgaccatccgctgactgacggcgacgaagtagctttcttcccgccggtaaccggaggttaagatggcagaaaccaaaattgttgttggtccgcagccgttcagcgtaggagaagagtacccgtggctggcggagcgtgacgaagacggtgcggtagtcacctttactggtaaggtgcgcaaccataacctgggcgacagcgtcaacgcattaaccctcgaacactatccggggatgactgaaaaagcactggcagaaattgttgatgaagcgcgtaaccgctggccgctggggcgcgtcactgtgattcaccgcatcggggaattatggccgggcgatgaaatcgtttttgtcggtgtcaccagtgcgcatcgcagcagtgcgtttgaagccgggcagtttattatggattatctcaaaacccgcgcaccgttctggaagcgcgaagccacgccggaaggcgaccgctgggttgaagctcgggagagcgatcagcaggcggcaaaacgctggtaattttttgttagccggataaggcaccgctgcgtccggcaatttcaccgctcagtacatacgtttacgctgcgtcgatgcacagcctcatcattttgcagtatccttaagatattccttatatcttcaggagatcgtcatggacagattcccacgttctgatagtatcgtacaaccccgggctggcttgcaaacttatatggctcaagtctatggctggatgaccgttggcttgttgctgaccgcatttgttgcctggtatgcggctaattccgcggccgtgatggagctgttgttcactaaccgtgtctttttaatcggtctgatcatcgcgcaattagcattggttattgtgttaagtgcgatgattcaaaagctgagcgcaggtgtaacgacgatgctctttatgctttatagcgcgctgacgggtcttacgctttccagtatattcattgtctataccgctgcttctatcgccagtactttcgtcgttactgccgggatgttcggcgcaatgagcctgtacggttacaccacgaagcgcgatttaagtggctttggcaatatgctgtttatggcgttaatcggcattgtgctggcaagcctggtcaacttctggttgaaaagcgaagcattgatgtgggcagttacctacatcggcgtgattgtctttgtcggattgacggcgtatgacacgcagaaactgaaaaatatgggtgagcagattgatacccgcgacacgagcaacctgcgcaaatattccattcttggcgcgttaaccttgtatctggacttcatcaacctgttcctgatgttgttgcggatcttcggcaaccgccgttaattctttttcaccatcactatcccggccatgtgtcgggatttttttcttactaaaaacgacacttaacaagtaccaggtataaaatatgccttatggacgagcggaagcgttttctgtatccataaatgcaaaagtattttgtatgcgtggttttaaatttattgatggtgaatattaatattttttctaaggataactaaaagaatggaaagttacagccaaaacagcaataaattagattttcagcacgaggccaggatattaaacggtatatggctcattaccgctttaggtttggtggcaaccgcaggactagcctggggagctaagtatatcgaaattacggcaaccaaatatgatagtccaccaatgtatgtcgccatagggttattattactttgtatgtatggcttaagtaaggatatcaacaagataaatgccgccatcgcgggcgtaatatatctgtttttactctctttggtggcgattgtcgttgcaagtttagttcctgtatatgccattatcatcgtgttcagcactgcgggcgcgatgtttttaatcagtatgctggccggtttattatttaatgttgatcctggttctcaccgttttatcattatgatgacgttgacagggttggccctggtaatcatcgtgaatgcggcattaatgagtgaacggcccatttggataataagttgcttaatgattgtgttatggagtggcattatcagccatggacgaaataagctccttgaattggcggggaaatgccatagtgaagagttgtggagtccggttcgttgcgcttttacaggtgcattaacactctattactattttatcggcttctttgggatacttgccgcgatagctataacgcttgtctggcaaaggcatacgcgtttttttcattaaccgtaaatgcacatactaaagaacttaactaaacttcacatcgccgcttcatttttcgcccgtagcttcttcgcctggctttccagcaacaggtaacagatcagcgccagcagcagtgggataaagtaatacagcacacggtaagcgagtagggcggcgataattgtacctttggaggtatgctccccagccagtagtgcgataaacaccgcttccagcacaccgatccccgccggaatatgcacgatgacgccagcaatactactaaccagtaacacgcccagtacaaagaaatagttcacgctttgaccaagtaacagccagataatcgcccccattaccatccagttaacgctggaaatcagcatctgagcgagggcgaatttccaactaggcagcaccagcttttgccctttgatggtcatatggcggtgcttcgcgaaagcgcaaaaccacaaataaaccgcgataatcatcagtaagccaatgccgagaatacgcagcgtagtttgatcgacataccagtgatccggcaactccaccacgcctgcggtaaagataatccctgccagtaaaatgtagcccagccagttggtggtaatactgaggctgaaaatccgcgtaatagtgctaccgggcaaccccagacgagagtacaaacgatagcgcataccaatgccgccgacccaggtactgagcgtcaggttgaaggcgtagcagataaagctcaccagcatcacctggcgcttcgccagtttgtgaccgcagtaaaagcgggcgagcaggtcatagcagccgtaaatcagatagctgacgaccaccagcccgaccgcactaagcagcgcaacgcgattgtagtcgcggatgaccttccagacctcttcccagtccacttttttggcgtagaccaccagcaacacaatcaccgcgataaaaaacagccaggtgaggatcttctttgctaagcgccagcgcgggtgacttttactcatcagggttttacccccgtgttttcagtttctacccgatcctgcgtttccattgtcggttgtgcgggcggatcaacctgcgccagacgtggcgtgtgtgccggaagccagccaaccagcgccgggaagtggcgtaaaaagtggaacgccagcacgcttttggtcaggttccaccaggtgcgtttgggcagcatggtttcatccacctgctgacaatctgcggcaataatgccgttcagattatcgcgcagcgtctggttaaaatgacgatcgtggatgatgacatttgcttcgagattcagactcaaactgagcggatcgagattactggaccctactgtcgcccagtgatcgtccatcaatgccactttgccgtggagcgggcggcggcggtactcaaaaacctgaacgccgcctttaaccagatagttatacagcaagcgcgcaccgactctgacaatcggcatatccggttcgccctgaatgatcagtttgatccgcaccccgcgccgtgccgctttacgcaaggcgtgtaaaaatcgatagccggggaagaagtaggcgttggcgataatcacttcccgccgcgcctgagtgagcattttcaaataatggcgttcaatatcatcgcgatgttcttcgttatcgcgccagaccagcaatacctgcgcttctcccggctggcggttctcttccgctttgtgatgacgtcgccaccagcgtcgtgccgcgctctgtccaggcaggttttccagctcaaactggagaatatcttcgacaatcggcccttcaaggcgtaccgcgtaatcctgtttagcctctggaccgtagctggacatatgctcggcggagtaattcagcccgccaataaaggctatacgcgcgtcgatcaccacaattttgcgatgcatccggcgaaacacattggtgcgcataccaaaaaggcgagggcggggatcgtagtagcggaacactacgccagctgccgtcagttcattgacaaactcatcgctgagatccgggctaccgtagccatccagcaagacttccgctttaaccccgcgttgcgctgctgccagtagtgccgcatgcagttgtttgccgacgtcatcctcaaaccagataaacgtttcaagaatgatgcgttcttgtgcctcgccaatcgccttaaacaccgcgggataatattgctcgccgttttccagcaactggatcttattgccttcgcgccagctacatttcataaatgaatctccgcacttaaaggggcatgatcagaaaggtgtcgccatgtccgcagcggcaacgcggttggcgcgctggcgctggcatttttgacgtagatcctgtccagtcgtagtagaggaaattgcaccggaaacgtgcgcgccgggcgtccgtgggcgcgggtaaaaatctcatccagtccggcctgcacttttaacggatgattagctttttgccgccagtcattgaaatcacccgccaccaataccggttcgccgtccggtagctcattcacccattcggcgagcatcgcaagctgcgcctgacggtgcgcctcacgcaggcccagatgtacgcacatcacatgaatcgcttttccggtcatcggcggcacaatgcggcagtagagcacgccgcgcttttccgcaccatcgacgctaacatcgcgattctcataatgttcaatgggataacggctcagtacggcgttgccgtgatgcccttccgggtatacggcattgcgaccgtaggcaaaatcgctccacatagtgtcggcgagaaactcgtagtggctggtatcgggccagttttccacatgcagcggatgaacttcgtgcgcgcccatcacttcctgcaggcaaacaatatcggcgctgacggtacgcacggcgtcgcgaagttccggcaaaatgaagcgtcggttaaacgcggtaaagcctttgtgaatattgatggtgagcaccttgaagctaaattgttgtgtttgatcgggcataattttcctgtctttgcctcttatctcattgaaatagtgtagtcggcgtcacaaaaaggtgcggtcttacggaattttccgtaaagttcggtactctgagtaagtagagataaattcttcaggagagaagccatgaagtggcaacaacgtgttcgtgtcgcaacgggtctaagttgctggcagattatgttgcatttactggtagtggcgctgctggtggtgggctggatgagtaagactctggttcacgtcggcgtgggattatgcgcactgtattgtgtcacggtagtgatgatgctggtgtttcagcgccaccccgagcaacgctggcgtgaggtggcagacgtgctggaagagctgaccacgacctggtattttggcgcagcgctgattgtgctgtggctgttgtcccgcgttctggaaaacaactttttgctggcaattgcagggctggcaatccttgccggcccggcggtagtgtctttgctggcgaaagataagaagttacatcaccttacgtctaaacatcgcgtacgccgctgattacatcaccttacgtctaaacatcgcgtacgccgcactccctgtcgtggccgttatcaccagtagcggccacaaactattccacacaatatccagactcgcatccttcaaataaatctgcttggtaatgtccgtaaagtggcgaatagggttaatccacgtcaggttttgcagccataccggcatgttttccaccggagaaacgtaaccggaaaggagaatggcgggcatcataaagacaaacacgccgataaacgcctgctgttgtgtactacagagactactaatcaacagaccgaatcccaccaggcttaaaccataaatcaccatcgtaaagtagaacagcgccaggcttccggcgaaggggatttgatacgcccagataccaatcgccagcacaatggtggcctggaaggtggcgacaattaacgccggtacggctttgccgatgaagatctgccaggtggtgagcgggctaaccagtagctgatcgagcgtaccttgttcacgttcgcgggcgacggaaagactagtgacgatcattacgccgatagtggtgatcatggcgatcagactcggcaccacaaaccatttgtagtcgagattcgggttataccagttgcgtaccaccagctcgctgttgttaggtttcggttttccttccagcagctcctgctgataatttttgacgatctgttgcaggtagttggcggcaatttgcgcactgttggagttacgcccgtcgaggatcaactgcaaaggcgcggtctggaaggtatccagtttgcggctgaagtcagccgggaaacgcaccagtagtaacgccttttgtgtgtcgatggttgggcggatctcctgtgggcttttcagcagcagcacatgagtaaaggcgctggcgcgggcaaaacgttgggtcagctccacgctatgctcgccgttatcttcatcgtagatggcgatggtggcgttagtcacttccagcgtggcggcgaacgggaacaggatcacctgaattagcacgggtaaaatcagaatcgcgcgggtttgcggttcgcgcagcaagctctgcaactctttgcggattaacgtccataagcgatgaaacatgctcttctccttaatccagccgacgtttggttttcagccacgtcaggccgataaacatcaccgcgctagcgatcaaaaacagcacgtttaccaccagcaccactggaatattcccggcgaggaacaggctttgcagggtgctgacgaaataacgagcgggaataatgtacgtcaccgcgcggatcaccgcgggcatactgtcgatctgaaaaataaagccggaaagcataatgctcggcagaaaagcggcgttcagggcgacctgagcggcattgaactggttgcgggtaatcgtggaaatcagcagccccatccccagggtactgagtaaaaacaggctggagataaaaaacagaatcagcaggctcccgcgatacggcacgccgagaataaacacactcaccagcatacacagcaacatcgccagcatcccgagaaagtaataagggatcagcttacacagcagcagttccgtgcgggtaatctccgtagagagcagagcctccatggtgccgcgttcccattctcgcgccaccaccaggctggtgagaatcgcgccgatgaccgtcatgataatggtcaccgcaccggggataatgaagtgctggctaatcgccgccgggttaaaccagtagcgggtttgtacatcaataagcggttcaaaagtctgcccgttgtcctccgctcgctgcatttgccagatctgccagatcccttcgacatacccctgtacaaagttagcggtattcggctcactgccgtcggtgatcacctgaatcggtgcggtggcgttggcgcgctccatctgttccgcaaaatccaccggaataaccaccagaccgcgaattttccccgcctgcattttggcgatcagttcctgacggttatcgctgatggtggcgtcgatgtaggggctaccggtcatggtgtgggtgaaatccagcgccgcttcgctacgctgttccagtaaaatcccgacccgcagcttgctggagtcgaggttaatgccgtaaccaaaaataaacagcagtagcagcgggatcactaccgcaatcagccagctactcggatcgcgaacgatctgccgcgtctctttaacgcacagcgcccgtacgcgacgccaggacaggatcgggttactcattgctatgctccttatcccagtcgtggatcaactgaataaaggcttgctccatggtgggatcgggttgctcatcgttagcgctctgtgctttcaaatcgtccggcgtgccgctggcgattaatttcccgcggtacaccaggccgatgcggtcgcaatattccgcttcatccataaagtgggtggtgaccatcaccgtgacgcctttctctaccatgctgttgatgtgcagccaaaattcacggcgggtgagggggtcaacgccggaagtcggttcgtcgagaaacagaatgtccggttcatgcatcaggctacaggccagcgccagccgctgtttaaaacctaatggcagttcatcggtggcgtgggaggcgatacttttcaggccgaacgcctcgctcatgcgggagattttttcgttctgcgcccgaccgcgtaagccatacacaccagagaaaaagcgtaaattctgttcgaccgtcaggttaccgtagaggctaaatttttgcgccatatagccgagatgctggcgcgctttaccggaactctctttcagatccatccccagcaccagcgcctggccggaagtcggcaccagcaaaccgcacatcatcttaaaggtggtgcttttacccgcgccgtttggccccagcaaaccaaaaatctccccacgtttaacggcaaagttgacgtgatcggtggcggcaaaatccccaaatttcttggtcagttctttcgcttcgatcaccgtctcgccgggtgtgccttctaccgtatgtaatattgcgcccagcgggctttcgctggttccggcaccgcccagcaaatcaataaacgcatcttcaaaacgcggcgtagtttcgttgatgttgatttccggcatcccgtcggcatggcgaatatcgtctggtgtggcctcttttttgaggatcagacgtacgcttttcccctgaatcatgccgtcgctgacctgcggcagtttcaaggcgcgttgcaacagtttgcggttgccctcgtgtggactggtcatcagaaagctgcgtccggccatggtttgtgtcagggcttttggttctccctgatacagcaactcgccttcgttcatcagtaacacgtcacggcactgctcggcttcgtcgagatagctggtactccagaggattaacatcccttcgcccgccagctcatgcaccatctgccacagttcgcgccgactgatagggtcaacgccgacgccgggttcatcgagcagcaacactttcggttcgcccaccagggtacaggccagaccgagtttttgtttcatcccaccggagagcttgcccgccaggcgtccggtaaacggcccaagagacgtaaactccagcaggcgagcaaaagtttgcttacgtgcctcgccggtgacgctgcgcaaatccgcgtacagattgaggttctccatcaccgtgagatcttcatacagaccaaatttctgcggcatataaccgagcacggcgtgcagcgcgccgtcgtttttgatcggatcaaagccaatcaccgtggcactgccgctgtcgggtttcagtaatcccgccaacatccgcatcagcgtggttttacctgcaccgtccggccccaccaaccccgtcacataaccggcgtgaatggtacaatcgagcggcgcgacggcgggcttgtccatgcccggaaagcgtttttccaggccgttcagcgtgataacggcatcattcatgtcctgcctcgtcaccgaattgtaccgtcactggcattccctggcgtaacgcatcatcggcgtcggtcaccacaatacgcaggcgatagacgaggtcggtacgcagatccggcgtttcgacggttttcggggtaaattcagcagtcgggctaacgaaaccaatctgcccgtgatacggcttgtccgggcgaccatcggtataaagcagcactttgcgccccggctgggcctggtcaagattacgttcatcaacataagcgcgcacccacaccggacgcgttagactaacggtaaacaccgtgccaccttcattgaggaccgtgcctggctccaccgcgcgcgttaacagcgtgccatcagacggggctatcaacgtactgtcctgtaaattcaactccgcctgcgccagttgcgcctgcgcctgttcgaggctggctttcgcctgagcgatgtcctgttcacggttaccggaacggtactgacgcaatttatcctgtgcacttttcagcgttgcctgcgcctggtcgcggctggagcgggcattttccaggtcatttgcgctaatagtgcggcttttccacaacccttgctggcggttatagaagttctgcgcatagtcataggcggcttgcgcctgtttcaccgctgcggcggcctgagcgatttcttcattgcgatacccggcaagcatcaggtcatactgcgcctgtgccacgctaacacccgctttcgcctgcatcagggcaatctcatacggcttgtgatccagttcgcccagcacctggcccgctttgatagcatcaccttcgtccaccgccaggctttcaacgcgccccccaacacggaaactaagatttaccgtacgaatatccacgttgccatacagcgtcaggccgttatcctggcggctttgataccaccagtagcctccggcaaccacggcggcaagtaccactaccgccaatccgatcacgacaggttttttcatcactacaaactcctttgcgataattacaaactcctttggcttaatccttgcaaaatcaggtcgatatgacaggtcaccgtctggttgatcagttcggtcttttcttcatcgaacgcggtccagccggtacgtaacagaattgtttctttgccaagacggaacgccagaatctcaccaatcaacgcatgggtatgaaggatcatgcgggtgtcattggcgtcgcagccggtccaggcggcaatcaggcgtgtcaggtggctgtgtagcggactaatcacctgttcgtgcaccaggtggtaggctgccgtgggagagagctgctcacgggagataaacttgctgaggttgacggtgtcatcctgggtgagcagcttaatcatgttcctgcaggcgcgaaggatcagttcacggatggcagcccgatcaggctgtggttgcgcgaacaagcgttcggcttcctcggcatgcggacggaactgctcgccaataaaatcggcaatccactgggcgcaggcgaggtacaaatcttctttgctaccgaagtagtaggtgatggcagcgatattctgcccggcctgggcggctatctcgcgagtggtggcgttcattccatattcaccaaactgcgccagtgcggcagcaatcagctgttttttcgcctgttcacccttgattgtcatggcaggattattcatcgcacagtccattcttaatcaaatgattgattaagattatgactccataggggagttgtccagtatggctaagaattttagcaacgccagtcacagggataatttatgcgctgcgtcacaaaaactgctacactccgctccctcatgacattgtggtttttgtcattttccttttcagtatctccctgaaaactacaccggtaacggtcggggcggttcggagtagttatgtctttcgattctttgggtttaagccctgatatcctgcgcgccgttgccgagcagggttaccgtgaacccacccctattcagcagcaggcgatccctgcggtgctggaaggccgcgacctgatggctagcgcccagaccggcaccggcaaaacagcgggctttacgctgccgctgttgcaacacctgatcactcgccagccgcacgccaaagggcgtcgtccggtacgtgcgctcattcttaccccgacccgtgaactggcggcgcagattggcgaaaacgtccgtgattacagcaaatacctgaacattcgtagcctggtggtgtttggtggtgtgagtattaacccgcagatgatgaaactgcgtggcggcgttgatgtgctggtggcaaccccgggacgtttgctggacctggaacatcagaatgcagtgaagctggatcaggttgaaatcctcgtcctcgatgaagctgaccgcatgctcgacatgggctttatccacgatatccgtcgcgtgttaacaaaactacctgcgaagcgccagaacctgttattctccgcgaccttctctgacgatattaaagccctggcggaaaaactgttgcacaacccgctggaaatcgaagtggcacgccgcaataccgcgtctgatcaggtgacccagcacgttcactttgtcgataagaaacgcaaacgcgaattgctgagccacatgattgggaaagggaactggcagcaggtgctggtgtttacccgtaccaaacacggcgctaaccatctggctgaacagctcaataaagatggcatccgtagtgcggcgatccacggcaataaaagccaaggtgcgcgtactcgtgcgctggctgattttaaaagcggcgatattcgtgtactggtggcaactgacatcgctgcgcgcggcctggatattgaagagctgccgcacgtcgtcaactatgaactgccaaacgtacctgaagattatgtccaccgtatcgggcgtaccggtcgtgcggctgctaccggtgaagcgttgagcctggtgtgtgttgatgaacacaaactgctgcgtgatatcgaaaaactgctgaaaaaagagatcccgcgcattgcgattccgggctatgagccggacccgagtatcaaagccgaaccgatccagaacggtcgccagcaacgtggcggcggcggtcgtgggcaaggtggtggtcgcggtcaacagcaaccacgccgtggggaaggtggcgcaaaatctgcaagcgcgaaacctgcagaaaaaccgtctcgccgcctcggcgatgccaaaccggcaggcgaacaacaacgtcgccgccgtccgcgtaaacctgccgctgcgcagtaatcttttatgccgggctatgcccggcatcaggctgatgaacaaacgcaaaactgcctgatgcgctacgcttatcaggcctacgtgaactctgcaatatattgaatttgcatgcttttgtaggccggataaggcgtttacgccgcatccggcatttcacaacaagcacttgtcagcaatttgagaacacgggaaaaaatttatctgttttaccgcccataagccaccgagacgttacttctctatagccaattgttcgcgcaactccattaaaaggtagcccagtcgattcttgcccttaccatgaccaccgtctccccagtaagcatcgttttccgtatgctcaaccagttttgcgggcgcggttgccagcaagagcgcacgcagttctgcatgctgttcgaatttagcgcgaagtgcttttcgcatcacctgttctttgacgctctcccagtttttacgcagaggcttagaacgatcgcgccccatgcgtgcggcgaccataggggaagaaacccgacggatctcttcgcggtatttttcatcaaggaatttttgtgcctgaaaatagtgttcactggtaggccaggttttcccgtcaaccttgatgggccaggcggcaaagttagaaaaatcaccgtagtcatcgctggtgctgtagaaatttatgatggtgtcttgcatgacgtgttggatcctttgtgctcgaacgggcattaaaccgcattatgttggtggttattgcgagccgctttccagaaacagaaaaaccattacccctgaaaaccgaaaaatgccacaatattggctgtttatacagtatttcaggttttctcatggcattaaccgccgcgcttaaagcgcaaattgccgcctggtataaggcgcttcaggaacagatccccgactttattccccgtgcgccgcagcggcagatgattgcggacgtcgccaaaacgctggccggagaagaagggcgacatctggcgattgaagcccccaccggcgttgggaaaacgctctcttatttgattcccggcatcgccattgcccgcgaagagcaaaaaacgctggtggtgagtaccgccaacgtggcattgcaggatcagatttacagcaaagatttaccgctgctgaaaaagatcattcccgatcttaaattcactgccgcttttgggcgtgggcgctacgtttgtccgcgtaatctgacggcgctcgccagtactgaacccacgcaacaggatctgctggcgtttcttgacgacgaactgacgccgaacaatcaggaagagcaaaaacgttgtgcgaagctgaagggcgatctcgatacttataaatgggatggtctgcgcgatcatactgatatcgctatagatgacgatctctggcgtcgtttaagtaccgacaaagccagctgcctcaaccgcaattgttactactatcgtgaatgcccgttttttgtcgctcgtcgggagattcaggaagcggaagtggtggtggcaaaccatgcgctggtgatggcggcgatggaaagcgaagcggtattgcctgacccgaaaaatttactgctggtgctggacgaaggccatcacctgccggatgtggcgcgggatgcgcttgagatgagcgccgaaatcaccgcgccgtggtatcggctacagctggacttgttcacgaaactggtcgctacctgcatggagcagtttcgcccgaagaccatcccaccgctggcgatccctgaacgtttgaatgcgcattgtgaagagttgtatgagcttatcgccagcttaaacaacattctcaatctctacatgcctgccgggcaggaggcagagcaccgttttgcgatgggcgaactgccagatgaagtgctggagatctgccagcggctggcaaaactcaccgagatgctgcgtggcctggcggagttatttcttaacgatttaagtgagaaaaccggcagccatgacattgtacgtctgcatcggttgattttgcagatgaaccgcgcgttggggatgttcgaggcgcaaagcaaactctggcggctggctagcctggcgcaatcttccggtgcaccggtgaccaaatgggcgacgcgggaagagcgcgaagggcagctacacctctggtttcactgcgtgggaatacgtgtcagcgatcagctggaaaggctgctgtggcgcagtattccgcacattattgtcacctccgcaaccttgcgtagcctgaacagttttagccgtttgcaggagatgagtggtctgaaagagaaagcgggcgaccgttttgtggcgctggattccccctttaaccactgcgaacagggcaaaattgttattccccggatgcgcgttgagccttccatcgacaacgaagagcagcatattgccgaaatggcggcctttttccgtaagcaggtggagagcaaaaaacatctcggtatgttggtactgtttgccagcggacgggcgatgcagcgctttctcgactatgtgacggatttacgtctgatgttgctggttcagggcgatcagccgcgttaccgtttagttgaactgcaccgcaaacgcgtcgccaacggtgagcgcagcgtgctggtgggcttacagagttttgccgaagggcttgatttgaaaggtgatctgctcagccaggtgcatatccacaaaatcgcttttccgcccatcgacagcccggtggtgatcaccgaaggggaatggctgaaaagcctcaaccgctatccgtttgaggtgcaaagcctgccgagcgccagctttaacctgattcagcaggttgggcgactgattcgaagccacggttgctggggcgaagtggttatctacgacaaacgcttgctgaccaaaaattatggcaagcgactactggatgcattaccggtatttccgatagagcaaccggaagtccctgaaggtatagttaaaaagaaagaaaaaacgaaatccccacgccgtcggcggcgttaatgatgtgagtcaggtaaggagtcgtaaatggactatcgcaaaatcattaaagagatcgggcgcgggaaaaaccacgcgcgcgatttagaccgggatactgcgcgcggtctgtatgctcatatgctcaatggtgaagtccctgaccttgagttgggcggcgtattgattgcgctgcgtatcaaaggagaaggggaagcagagatgctcggcttttacgaagccatgcaaaatcacaccatcaagctgacgccgccagcaggcaagccgatgccgattgtcatccccagttacaacggcgcgcgtaaacaggccaacctgacgccgttgttggcgattctcctgcacaaactcggttttcctgtggtggttcacggggttagcgaagatccaacccgcgtgctgactgaaaccatttttgaattgatgggtattacgccaacgttgcacggcgggcaggcgcaggcgaagctcgacgaacatcaaccggtgtttatgccagtcggcgcgttttgcccgccgctggaaaaacaactggcgatgcgctggcggatgggcgtgcgtaacagtgcacataccctggcgaaactggcgacgccatttgccgaaggtgaggcgctgcgtctttccagcgttagccatccggaatacattggacgcgtcgcgaagttctttagcgatatcggcgggcgggcgctactaatgcatggtactgaaggtgaagtgtatgctaatccgcagcgctgcccgcagatcaatctcattgaccgtgaagggatgcgggtgctgtatgaaaaacaggacactgctggtagcgagttactgccacaagcaaaagatccggaaaccacggcgcagtggattgagcgttgccttgctggcagcgaaccgattcccgaaagcctgaaaatccagatggcttgctgcctggtggctacgggtgaagcggcaactatcagcgacggcctggcgcgcgttaatcaggcattttaattcttttctcagccggatgagccatgtcatccggcttttaccccaccgcaatatgaaattcctgcatctttattgaccttcccacgcccggcgtgcagcataaaaatacaacaaacacataacataaacaggagttaaccatggaaagtggtcatcgctttgatgctcagacgctgcacagttttattcaggctgtatttcgtcagatgggtagcgaggaacaagaagcgaaattagttgccgatcatttaatcgcggcaaacctggcagggcatgatagtcatggtattggcatgatcccaagctatgtacgctcctggagtcaggggcacctgcaaattaaccatcatgccaaaaccgttaaagaggcgggggcggcggtcacgctcgatggcgatcgcgcatttggtcaggtcgcggcacatgaagcgatggcgctggggattgagaaagcgcatcagcacggtattgccgccgtggcgctacataacagccatcatatcggccgtatcggttactgggcggagcagtgtgcagcggcggggtttgtctctatccactttgttagcgtggtcggtattccaatggtcgcgccgttccacggtcgcgacagccgctttggcaccaatccgttctgtgtggttttccctcgtaaagataatttcccgctgttgcttgattacgccaccagcgccattgcatttggcaaaacccgcgtcgcctggcataaaggcgtccccgtgccgccaggttgcctgattgacgttaacggcgtgccgacgaccaatccggcggtaatgcaggagagcccgttgggtagcctgttgacctttgccgaacataaaggctacgcccttgcagcgatgtgtgaaattcttggcggggcgctttccggcggtaaaacgacgcatcaggaaacgttacaaaccagtcccgatgccattcttaactgcatgaccactatcatcatcaacccggaactcttcggcgcgccggattgtaacgcgcagaccgaagcctttgccgagtgggtgaaagccagcccgcatgatgatgataagccgattttgctaccgggcgagtgggaagtgaacacgcgtcgcgaacggcagaagcaggggattccactggatgcgggaagctggcaggccatttgtgatgcagcgcggcagattggtatgccggaagagacgttgcaggctttctgtcagcagttagccagctaaaaaaaaagcccgtccagtggcggacgggcaaacaagggtaacataggatcaatgagggttagagcatatgcgtctgtcggcaaacagacagggaaatacttgtgctggacgtagcgtaaacgcctgatccgtccaacggttcggattttgtaggcctgataagacgcggtagcgtcgcatcaggcatctgttgccggatgcggcgtaaacgccttatccgtcctacgaattacttataaattaccgcagtaccgcttaatttattgttgttggtggcggaagtgatgctgtatccactggcaccggctgccgcggctttctcagccagtttcgcttccagggcatcgagggtggatgcgccatcggcagaaaccacgccgattttattcatgttctgtgcctgggatgccgttaccggttccgccgcgaacacgccaaaactcagagtactaagagccatagcagcaacaacagtattgatagttttcataattaatctctcgcaggtgatttttgtataagtgacgttgtttcgtcgatgtgatgagtatcacgtttttttacgagagataaaatcgaagagaattgaccgccttgttcaaataaattgattgatatctaacctactgataaaccatttatttgttgtacttatgaacttgttttataccgcgtggcagtcacagcagcgttaaaggcacggaatgacacgcaaaatacaaattatactcgctatgcatctcgccagttgtagttaacgtaactggctgtctttgctacctctgcgattatatcctgtataagctggtttttgtaaatctttctcctgctgacaatgaatacataagcgcacgccaggaatggcttcccgacgggcctgcgggatgggggcaccgcactcttcacattcatccaggctttcgccgcgcggaatttcaccccgagcgcgggcaatcgcatcttcaattgtactgttgatctgttcgttgacggcgtcatcgttagcccaaccggatgccatatcgacctccccatatcaatacttgtacagttaagtgtagctaatccagggacgaactcgggcagttcaagcatcagatctcgctccattcccgcagcagattatgataaagattaagcaggctcaggatctcttcactttcgccgtagcggcttttcaggctctgaatattgttgtccagttcaaacagcatggcgcgctttttatcatcgcggatcatgctctggatccacataaaacttgccactcgtacgccgcgggttacgggtgtcacgcaatgcaggctgctggagggatacaacacgagatcgcctgccgggagttttacccgatgttgtccgaaggtgtcattaacgaccagttcgccgccgtcgtagctttgtggatcgcttaaaaacagcgtggcagaaaggtcagtacgcatccagccgttttgtggatggctgcgtactgcgccatccacatggaaaccataggtttcattgttctgatagcgattaaacagcggcgtggaaagggtacgcggcaaggccgcggcaaagaataaagcatgttggttaaccgcgttcagcacctcattttgcagggcggcgtataacgtgctgcgggtgtcgacctgttgattgttcttaacttgcgcaccttgtgcgccggtggtgacgcgtccatccacccattcggcttgttccagttgttcgcgaaaacgagcgacgtcctgtgggcttaacacgccgggaatgtggtacatcatacaatttctccaaaaagtggggcctgcgccccacatctgaatcagaaatgcatattggctgtgagcaagaaggttcttggctcgcccgggtgataacggtagccgctcttgttgatactggcgacgtaatcggtatcaaacaggttgtaaacgtttagctggaagtcgagattgcgattaactcgataccccagtttggcatcggcgacccagtaaccttcggtaaacgctggcgttcccaccgcgccgtcactacctttatgcatactgccgatatagcgtgcgcccgcgccaacagagatatcgtcggttgcctgatattggctccataaggtgaaggcgtgctccggggtatacggcaggctactggaaccatcctgggcaacatctttgccgtttttgatggttgctttttgctgggtatagccgccaatcacctgccacgcgggagtgatattcccggccacggatatctcatagccttcgacgcgtttcttaccgtattggctgtaagttccgtcatcattttgctcaacttcattttcgatatcagtgcggaacagcgcggcggtgagcaacagacgtttatccagaacctgccatttggtgccaatctcgctggtgttggctttttgcggtttaaaatcggtgcggttggcactgttaccgctgccagactgcgcaagggcgaagttgttgccgcccggaggctgctgggaaacggcatagttaatatagacattgccgttttccgtcaggtgatacagcgccccggctttccagttcatcagattgccgctcttggcggtgtcgacggtggtgaccggagaaccttttgccacaccagttgggcaggtgatggcaccgcgtccgctgccgccgcaggcggtggcactgtcatattcagtatgataattatccagacggatcccgccgttcagctcaaaatcacgggtgatttgcagcgtatcaaaggcgtaaattgcgaaggtatccgtctgaccattggcgtttgcgccgttgcgcgtcaggccgccgggatgaatgctgctgtcaggatgataaatatttaccgcgggtaacgtcaccggattaacgccgtagttagtctgcgtttcacgggtaaattccacgccggtactgacatcatgaccgatagaaccggtatagaacgtgctggtcaggttggtctggttggtgagaattttattactcacatctttggtattcgccgtgcgactccaggtccagctattcacatcgctggtgggctgagtaatattgctcgccccgcccataatcgccgtcatcaggtaatcctgctttacgcggctccaacgggtagtattgcgaatggtggtgttatcgttgatgtcgtgctcaaaacgcatggtggcggtgtcggtggtgctatcgtcgtaatcggaatccgtgccgtaaaagttatgagtatcaacttttccggaatgattcagggccgccgttcccgcagatggggcagaatagcccggcaaaccgatggtcggaatgccgccgtctggcgtgttgtgctgggtgacatgcagataattaagatacaaacgattcgctgtaccaaggccaaaagcgacagaaggggcgacgccgtaacgctcatttttgactttgtcgcgtccggcatcgtgcgttttttcgcccattacattcaggcgcaccgcggtggtatcaccaatgacctgattgacgtccagcgtgccgcggcggaaccaggcgctgccaatactggcggaggcgtcaatgccggaatcattgcgcggctgcttgctgatcatattgatgctgcctgtcggtgcgctgcgcccgtagtcggtgccggacggccctttaatcacttcgacctgctcggtattgaaggtgtcgcggctgacgctgccgatatcgcgaatgccatcaatataaatactgttagaggtatcggcaccacgcatataaatggcgtcgccagtggtggagttaccgttctcacccgcaaaaaacgcacccacgccggggacgtttttgagcgcgtcggtaaggttggttgcgccctgatctttaatcacttgttcagaaattaccgtcatcgtgcgggtagtatccgctaccggacggctgaatttcggatcggcagattgttgtggcgcataaaggctaggcgtacttgcttcgacaaccagcgtgtcatccgcgttagtttgcccttcggcggcgagtgcctgagccacaggcgtgatgccaatacaaagaccggcaaagaacgtgaggctatgaaattgtctggcagggaaattgcgattgttttccattttgcaggtgactttttcttatatgttgaaattttcactgccacgagaaagcctctctgcggatgcgatgccactgttaatcccgtgatagtgctcgtgaaagtgataataattttgataagcattatcacttggagcgattttctatcacccattgcgcgaaaaagaaatacatttatttacattgagttcatatttgatgttttttgattacaaaacagacgaaaactgcatccagaggcgaatgcagttacgttggtggggttatttgtagatggttgcagtaccgaacatctggtcatttccgcctgcggaattaatgacataacctttcgcgccttgttcgcgcgctttttctgccagtttatcctccagatcgcttaggttacttgcgccagttgcgctaacggtaccggcgggccgtagctgaccgctgtccaggttactcatcggttgcgcggcataagccgtgagagagattccgctcaggacggtggcaatcagtagtgtgaggcactttttcataatgacatcctcataaatacaacgggtagtgcctgataagtgtaggtcgcctgcgcgatgcaaatgacgcaaaaaattgacagagatgtgcttattttttgaacgatatatttttacaaaataagacaaatcaatgacatgcataatgctgatttttatgatgaattgccataaaccatagccatgttaaggttttggggaatgataaacgcagccagatatttaccctgtcgcgttatgcgggtatcttacgccgctgcttaaaggagaatgctatgtccgcccagaaaccggggttgcatccgcgcaaccgtcatcacagccgctacgatctcgccacgctttgtcaggtcaatcctgaactcaggcaattcctcacgcttacacccgccggggagcaaagcgtagactttgccaatccgctggcggtgaaggcgctcaataaggcgttgctggcccatttttacgccgtagcgaactgggatatccccgacggttttctctgcccaccagtaccgggccgggcggattatattcatcaccttgccgatttactggcagaagcaagcggaacaattccagcgaatgccagcattctggatatcggcgttggtgcgaactgtatttatccgctgattggcgtacatgaatatggctggcgttttaccggtagtgaaaccagcagccaggcgttaagcagtgcgcaggcgattatcagttctaatccggggcttaaccgcgccattcgtctgcgtcggcaaaaagagagtggggcgatttttaacggcatcatccataaaaacgagcaatacgacgcgaccttgtgtaacccgccattccacgattccgccgctgcggcacgggcaggtagtgagcgtaaacgccgtaacctggggctgaacaaagacgatgcactgaactttggcggccagcaacaggagttgtggtgtgaaggcggtgaagtcacctttatcaaaaagatgattgaagagagcaaaggcttcgcgaagcaggtgatgtggtttacaagtctggtatctcgtggtgaaaacttaccgccgttgtatcgtgccctgacggacgtgggcgcggtgaaggtggttaaaaaagagatggcccaggggcaaaagcagagtcgctttattgcctggacctttatgaacgacgagcagcgccgccgttttgtcaatcgccagcgttaaagcgttggttcccccggcggtaacggttcagccggggtcgcgcccggagcaggcagcacctgataagtctgcactggcgcgcgaacgcccgccaggtcgaaatgttttttcacctggctgtcgagggcaaagcgtaccgtccactgtttgagtggcagcgtggtgaagctaacacgcagtgtaaacgcggtattgcttaagccgacaatcccggcaaaattcggttcaccaataatcagcccgcgaatttcttcgttttccattaattccgctaccgcatctttcagtgcctgattggctttatcagcatcttcatggcgatcaacatcataatttgccaccacgctaccaatgccgcggacaaagttagcaaaggtggttatgctagaccacggaatgatgtgatacgccccggtatcctgtcgtacgcccacggagcgaatgctcatccgttccactgtgccggtcaacggcccgatagtcaccaaatctccagtgttcatgccgttttcaaactgaataaataccccggtgataatatctttcaccagcgtttggctaccaaagctgatagccagacctaatgccccggcacctgccagcaatggcgcgatattgacgccgatttcgctcaacacaatcatgatggtgatggtactgataatcaccgccagcgcgttacgaaacagcgtaagcagggtacgcgtgcgggcgctgggtagcgggcggccatgaatatcgctagccagccggttttcgatcaaactggcgagcaccgtccagccaaccgcgctgaagaaaagaatgagtgcgatacggatcaggatatctacggttttctgccccgcgccgttttgcagccagttccagaaatcgaacaatccccatgcgctcaacagcaacattaccgccacgcagactgtcagaatacgcgccgttttcagcgccgcgctcagccagccattcaaccgtttttgcagctccggatagttacgctgagtatgtgggctgagagtgatggttttcgccagccagcgggaaaacataccggaaacaaacgctgcgataccaataatcgccaggctgcgcaccgttgcacccatcataaatttcaggctgttgcccggatcgaacaagctaaagaaaaacagcacgataaaataggcgcttgccagccagtgccacaccagcgcaaaggcgcggataaacaggctgaaaaaggccaggctatgctccgcgaagttgagcaaatgctgggtaatctcttttttattacgaaagatcaggtacaacgcccagacggtcatgcacagcataatgatgacgttcgccagcgcacctatctgtacattcacctgattagagataatcggcacggccacaatcaggccataacctatcaaactgcttaaccagctcaggcgacgactccagtaacgggcgctctcgtcctgaatcgtgaacgggcgcagctccgccacgtttgggcaaaaaatcaggcgtagtacggctttgaaaaattcaatgagggcaaaggcgttgagaaacaaactttgttggaaagcgatggtgcgactgcctgcattcaggttgtcgcttaatacctggccgacaaataatgtcagggccagtaacagcaggtcgataataaacgccccgataatcatcgccggaagctgcaaccagttactgcgctcacgatttttttgccgcgcccactgacccattttgcgatacagcggcagtgcgcacaggcgaatcagccagtaaaaaccaaacactaataccgctaacatactaaaatgggtcagcgcattgctgaaggtttgtggattaaacggcttatgcggggagccggtgatattgcgataaagttgcccgaagcgggcggaaagggcttcaccataatggcggctgacttcggtgaccttttgcagcacggtttgctcttcgaccagcgtcggcggcactatttttggtaccggttcagcagggggcgtagcggcaacggtgcgcaactggtcgatcaactctttacggctggtgtcattatccagcacatccgccagtgcgccataggccgcttttttttgttcgatatccggttccggggccggttcagtcgtactgtccgttgtcgttgtggttgtaacgccgggtatggataccgcgtgggcaggtgcgcccagcaggcagaagaggatgaacaggatccaccgcatgactcctccagtgagaaaatagagcaaaaagataagtatagatgctggaggaggggcgattttaaatgagaggaatctggtgtgcctccctttcgggtgaaagggaggaagggatattaagcaggttgctgacaacgtgcgggcttttttgccggatgcggcgtgaacgccttatccgtcctacaagttcatgcaattttaataagttgccagatatcctgtaggcctgataagcgtagcgcatcaggcaatgtgtcttattaagagacgtgctgcaaaaattcctgcaagcgctggctcggcgggttcttgatcaacacctgcggattgccatcttccgcaatccggcctttgtcgataaagatcagccggctagctactttctcggcaaaaccgatttcgtgggtcacgatcaccatcgtcatcccttcttcagccagatcctgcataaccttcagcacttcatggcgcagttccgggtcaagagcggaagtcggttcatcaaacagcatcattttcggcttcaccgccagcgcgcgggcaatcgccacacgctgctgttgaccaccagaaagttcggaagggtagtgatgtgcacgttctgccagaccgactttcgccagcagctcacgtgccagtttttccgcctcttctttgttcgcgccacgcacgcgtagcgggccaaacatgacgttttccagcgctgtcagatgcgggaagaggtaaaactgctggaacaccatacctgcttcctggcgaatcaggcgctcgtcaactttcggatcgttaaccttcaggccatcgacaatcagatcgccggaggtgatttcttccagtttgttgatgcagcgcagcagggtgcttttaccggaaccggacggcccgataatcaccacgacttcgccctgggcaatgttcaaatcgatattgtgcagcacctgggttgggccaaagtgcttggagacgtttttaaattcaatcacaggattttcatccttctttccagacgacgcagaataaagctcagcaccagggtaataatcagatagaacaccgccacggcgctccagatctcaagggcgcggaagttaccggcaataatttcttgcccctgacgggtcagttccgccacgccgatcacaataaacaggctggtgtctttaatgctgatgatccactggttacccagcggcggcagcatacgacgcagtgccagcggtaaaatgacgtagcgaatggtttcccaacgactaagaccgagcgccagtcctgcttcacgaaaacctttgtggatagacagcaccgcaccacgcgtgatttccgcaatatacgcgccggagttgatcatgatggtgaccaccgccgcagtaaatgggtcgatgcgtaagtcgttaaacgccatcggcagggcgaaataaataaacatcacctggacgacgataggtgtgccgcggatcacttcaataaagaccagcgcgacgtggttggctatccaacctccgaaggtgcgtgcaaaacctgccagcaatccgattaccagaccgcctgccagaccgaggacgctaatccacagggtcattttggcaccttcaatcagaagcggaatggcaggccagatggcactccagtcaaactgcatatgttgttcctgttaccgtggtgtaaataatcaaattcagggtaattaatggccccggagcgggtttgcgcccctcaccctaatcctctccccataggggagagggaactgccagtgcgttttacaggtgtagcgttattatttcggttcagtaccgaaccattttttgtagatttcgttgtaagttccgttctcgcgcagggttttcaacgcgccgttgactttgtcacgcagctcgtcgctacctttcgggaacgcaataccgtattgctgcgcttccagagagtcacctaccgctttgaactgaccgttaccggcggttttgatgaagtacagaatgtttggcgtatcgtgcagaacggcgtctgcgcggttggtgcccagttccatataggcgttatcgatgttcgggaactgacgcagatctttagttttgatgtttgctttcgcgtaatcaacggagccagtaccgctcttcacagcaaccactttcccgtcgagatctttcacgcttttcacatcgttattgttagctttcaccatcactaacaggccgcttttgtagtagccgtcagagaaatcgatcgcttttttacgctcgtcggtgatggtaatgcccgccagcgccagatcgacgtttttggtttgcagtgccggaatgatcccactgaaatccatcggcttcagttcgtaatccagcttcagctctttagcgatggcagcccacagatcaacgtcaaagcccacatatttatcgccctgtttaaattcaaacggaacgaaggcggtatccgtcgcgacaactaattttttatccgcggcatgagaagaaaccgcaaaagccagggtcagtgcagccagactaacttttaatacagacttcatagcatttccttttttctatccacgggacgatcccctgcgtgacattcacatatatgaaaaaatcgtgccagttttgcaactccttgatttttcgagatgcggcaaaaacgtgatgcacgatttatagggcaataccctgaagatgcaccattctggggcaccaatctggtgcgctaaaattgtgcactcaacacagtgattatttagcgtaaaacctgatgaaaaaacaatctttatgtaacgattgtgtgatgatgtggatacaaaaaatttacttaatcagctggagatagcagatggatgcactaaataagtgcgttgaggtgggctgcaaaacaaaacggcctcctgtcaggaagccgcttttatcgggtactaaagttctgcaccatcagcgatggatttattcgatgttagactcgataaaccacaggaatttatccaggtcgcgagacgcggcggtcaggatatctgcggtgtcgtcatctttcgcttcgccaatcgctttgcgtacgtcattagcgacgattgcgtaacggtcagccagttctttcaggtgatcctgaacgttgtggatgtccagcgggtaacttttcagcggggttttgctgttgataacttgagtggtccccagagctacaccgcccagctgcactgcacgttctgccatggtatccagatgatcgatcagtgcggtgcggaagccatccagcatttcatgtacggcaatgaagttagcgccgcgcatgttccagtgcgcttgtttggtaatcaaagaaagatcaataaactggataacctggcgattcagcaactctactgttgcttttttctcgctgtcggagacatcgttgcgggtataaagcagattggtcgctttacttttaactaatttagcggtactcataatttcatatcctcttgatgttatgtcccagtaattaacgagattaagtatagcaccggctatgtgttccgctattctggctgttcctatcacactaatagtggtaacaagcgtgaaaaacaaaactaataaagattcaatgagttagatatattgataagaacaattcttatttatctgctcgccaggaattttcggaataaatatgcttttgcataattcgatatataaagacggtgtagaggaaaagtagcgagaaattctgcatggttatgcataaccatgcagaaatgtaaatttaattaatgtctaattcttttattttgctctctttgcgtactgtcagcgtagaccccatactagcggcgatgatagcgccgagcgccagtagctgtatgggtgtcagtgtttctccgaggaaaatcatcccggaaacggcagccagcgccggttccatgctcatcagcgtaccaaatgtccgtgttggcaaacgggtgagggcaatcatttccaggctataaggcagagcggtgctgagaatagcgacagccagacccaatggaataacgctccagtgccagagtgcttcaccagcctgaagcgctccaattggcacgaaaattaacgctgcaatcaagctaccaattgccaccgtcgcagggccatgttccgctcctgcgcgttgcccacttaaaatgtaaatagcccaacaagccccggcccccagtgccagcgcacagccggttaaatcgacatgggaaacgtcttgccccagcggtagcaggaaccacagaccaagaaccgccagcacaacccagacgaaatctaccgggcgacgagaagagaacagcgccaccgccagtggtccggtgaactccagcgccaccgcaatacccagcggtactgtctgaatagaaagataaaaaagataattcatcccacccaggctaacgccgtaaaacaacagcggtaaccgttgctctttggcaaagcgcagtcgccatggcttaaagaacgcgatgaggatcagcgttcctaatgccagacgcagcgcagtgacacccggtgcgcccaccagaggaaaaagactcttagctaagctggctccaccctgaatagacgccatggcaacgagcaatatgactattggtaaccagaccggcattttacgtaaactaccaggcatcctttctcccacaaatatctagacttaagtaaagcgtggagtgtactggatatacccaatgctggttgagcatttgttgaaaaaattttcccccgttttgactaaaatgcgccaggattgatggaatcattagtctggtgattaggaataatctggatgaatgacagggaaaacatgcgtaatacttacgcagttctctgaaaaagtgatttaaatttagatggatagcggtgtatggaaacgttctgttacatgaaatggcccgttagacatcacaaatcgcgaagagtttcccattaatttttgatatatttaaaacttaggacttatttgaatcacatttgaggtggttatgaaaaaaattgcatgtcttagtgcactggccgcagttctggctttcaccgcaggtacttccgtagctgcgacttctactgtaactggcggttacgcacagagcgacgctcagggccaaatgaacaaaatgggcggtttcaacctgaaataccgctatgaagaagacaacagcccgctgggtgtgatcggttctttcacttacaccgagaaaagccgtactgcaagctctggtgactacaacaaaaaccagtactacggcatcactgctggtccggcttaccgcattaacgactgggcaagcatctacggtgtagtgggtgtgggttatggtaaattccagaccactgaatacccgacctacaaacacgacaccagcgactacggtttctcctacggtgcgggtctgcagttcaacccgatggaaaacgttgctctggacttctcttacgagcagagccgtattcgtagcgttgacgtaggcacctggattgccggtgttggttaccgcttctaatcactttggtgatataaaaaatccgcctctcggggcggatttttgtttttaaggtttcgggtcgaaaatatcggttccgagatggttgtaatccaccttctgtaactggaagttggtgatgtatatcggcccggctttcttctcagatataaacgggtatttgatgttaatttccttcgctttaatccccgtccactgggagaaaaagcctaagaagtcattggcactgcggcgggctttaatcacacgatgcgctttatcgtcgctggaaatgaccataaaaggcacctggaaattttgctgatatttatcatcatgggcaaggtattgcacgtctttaccgcgctctttaaaggccagaccgtggtcagaaaagtaaaccaggctgaagctgctgccgctgttgcgtaactgatcgtacagcttgcgcagtaaatcgtccgtttgcgtcatggtatagagatagcagctcgtttctttgctttgcacaaaggtttcgtattttccttgtgtcctgtcgcaggcctgcggatgactgcccatcagatgtagaacaatcagctgcggttggctgtgctcttgcgccagcacttgagcggtcatatccagtaacgcttcgtctttggtgtttttatctgcttcaaaattaccttctttcaggaagtacacttcatctgctcgtttggcgatgctggcgatagcggtatcgtattcgccgatttgaccctggttggaaaaccaccaggtctggaagcccgcgcgatttgccagggtgacaaagttatcctgaaactgtggtttgccatcgacaacgcgattgagcgttaagccaaggcttttctgcgtggagccactggcggcaatgtagtcagcaaatatcaaaccgttaacgctgctggcaaacggggtattgtcccagtgaccgccaaaggcaccgagggcatcgcgacgcgcgctttcaccgatcaccaccacataggtctgatacttcggcttaacggcagtgaccgtccaggtatctttcattccggaaagttttgccatccgttcttgctcttcaatcacctcgttattattgacgatgacatccttagcaaaacgaaataccggatagccagtatctttcagtttaaatacgccaccccaggccaggttttgcacgggagcaacaaaaaatgtcgccacactgaataccagacacaggctgtcgaaggtattccagcgcgctttttcattctctttttttcgcctgattgctattacgccgagcgcaaaaataaataagccgaccaggtagctgtaccacggaaaaatcgtcaggatttcggtgctctcttccatattggtggagtgcaatgccagcaatgtattgaaattaggcgcgccgtaggcctgagcaaaagggaaataacaagccgccaccaggctactgacaccgaccagaactttttgtacgcgaggcaatgttcgccatagcaaaagcaaaatagccgtaaacgcagcggtgtagagcaaactgaaggggtaacctaagccgaggttaattaataggctctgtaaaaagtagaacgcagtccacgggctaaatacccggctacgggtaacaaggctttctttgagggttaaattcatatgccactatcgtaacaaacgccatgtgcttaccctggcgtcaagggtcaatacctgcaagagtgcgtgaagagtggaaaggggtccgcatccgcgagccgcaatatacgcagggctgcaagaagatagagcgagccgccgtagtggtcaactactgacgaacaaatcttttgcgaaggggattgcaaatccgacaaaaagtggggtttttcagaccaaaacgcgttatgcctgcatgaaagcaggagtgaagcggcgtaccgcgacgccgctatttatcggaaggtttatcttgctgcggtttgttgttgaccatatcgcacaacatagagagcagcattaaccgtactttaaagggagaatgactaaacacgcgcatacacctcttgaactcattcataagacctcctgacttgctaatcccgtcgatccttgaggggtgattgcattacatacagatatagcacaggctatattatatagctattgctaaaacgttaattttttgtaccttcgcaactctggtttacaatgtgcgcacgaaatgagaacgctatgtatgcgtcaccataatgaggaagcacaatgagtcgtcgcgcaggtacgccaacagcaaaaaaagtgacgcagttagtgaacgtggaagagcacgttgaagggttccgccaggtcagagaggcgcatcggcgcgagcttattgatgattacgttgagctgatttctgacttgatcagggaagtgggggaagctcgtcaggtggacatggctgctcgtctgggagttagccaaccgacggtggctaaaatgcttaagcggctggcaaccatggggctgattgaaatgatcccctggcgtggcgtgtttttaacggcagaaggagagaagctggcgcaggaaagccgcgagcgacatcagatagtcgaaaatttcttgttggtgttgggcgtcagtccggaaatcgcccgtcgcgacgcggaaggcatggagcaccatgttagtgaagagacgctcgacgcttttcgtttgtttacccagaaacacggtgccaaatgagcctgccttttttacgcacgctgcaaggcgatcgtttttttcagttattaattcttgttggtatcggattaagctttttcgtgccctttgcaccgaaatcctggcctgctgctatcgactggcacaccatcatcaccttaagcggcctgatgctgctgaccaaaggtgtggagttaagcggttattttgatgtgctggggcgcaaaatggtgcgccgctttgctacggagcgtcggctggcgatgtttatggtgctggcggcggcgctgctttctacctttctgaccaacgatgtcgcgctgtttattgttgttccgctgactatcacgctaaaaagactgtgtgagatcccggttaatcggctgattatttttgaggcgctggcagtcaacgctggtagcctactgacgccaattggcaacccgcaaaatattcttatctggggacgttctggtcttagctttgccggatttattgcccaaatggcaccgctggctggcgcaatgatgctgacgctcctgctcctgtgctggtgttgtttccctggaaaggcgatgcaataccatacgggggtgcaaacaccggagtggaaaccgcggctggtgtggagttgtctggggctgtatatcgtctttctgacggcgctggagttcaaacaagagctgtggggactggtgattgtggcggcaggctttgcgctgctggcacgtcgcgtggtgctcagtgtggactggacgctgctgctggtgtttatggcgatgtttatcgacgtccatttactgacccagcttccagcgttgcaaggcgtgttgggtaacgtgagtcatctatctgaacccgggttatggttaacggcaatcggtttaagccaggtgatcagtaacgtgccgagtaccatattgttgctgaactatgtgccgccgtctttattactggtatgggcggtaaacgtaggtggctttgggttattacccggaagcctggcaaatttgattgcgctacgtatggcgaacgatcgccgcatctggtggcgtttccatctctatagtataccgatgctgttgtgggcggcgttggtgggatatgttttgttagttatactcccggccaactaaggtctggcaaataaaaaaggcggattatgagtccgccttttgctttaagttttgaagattaattcagacgaaccggcatcccggagcggtttttaatcgcttcatcaagaacaacctggtcaacatctggctgaccggtcactgtctgcacgctcttcgtcagggtaattggcacaatttcctgaccttcaaactgggcttcggtggtagacagcgggttatggacttcaatataacggctgccgtctggctcggtggtcgcttttaccggctcatcaataaactgtacgcgggtaccgaccggtactttctcgaacaggaatttgatgtcttcgttacgcagacgcacacaaccatgacttacacgcaggccgataccgaagttggcgttggtgccatggatagcatacaggcgaccgatatagagtgcatacagccccatcgggttatccggacctgccggaacgacagccggaagcggttcgcccgcagcgcggtactctgcgtgcattttggcggtcggcgtccaggtcgggcctgcttttttacgctcaactttggtggtccagttgataggcgtatctttgcctaactgaccaatgccgatcggcagcacgataacggtgttggtccctttcggatagtaataaagacgcatctcagcactgttaatgacgatgccttcatgaacggtatccggcaggatcagctgctgcggaatgttcagtacagtaccgcctttcggcaggaaggtatccacacccgggttcgcttccatcatattggaaagccccatctggtactcggcggcaaaatactccagcggctgagtgttaccttcaggaatggtgatcacctgattctgaccaaccaggcgactcccgtcggttggcagaggataagttaccgcagaggcggtactgcaaaagccgacaacagcgaaggccgctgcgaataatgttttcaatttcatattcatgttaagcgagattttgtgcctggcaggccattgggttgagaatattagagtattggaagcgcattataagttcattccagctcacagtgaaatcagatgtgtacgaaatcacattttttgcctttggcttgagtgtagaccttaagcgaggagcaggatcttctttcagacttatggcataatgcgcggtttgtcatatctcttttcaggatacgcctgtgttagtttccagtaacgtcaccatgcagttcggcagtaagccgttgtttgaaaacatttccgtcaaatttggcggcggcaaccgttacggcctgattggcgcgaacggtagtggtaaatccacctttatgaagatcctcggcggcgaccttgagccgacgctgggtaacgtttccctcgatcccaacgagcgcattggtaaactgcgtcaggatcagtttgcctttgaagagttcactgtgctggatacggtgatcatggggcataaagagttgtgggaagtgaagcaggagcgcgaccgcatctatgctttgccggaaatgagtgaagaagacggctataaagtggccgatctggaagttaaatacggcgaaatggacggttactctgcggaagctcgcgccggtgaactgttgcttggcgtgggaattccagtggaacagcactacggcccgatgagtgaagttgctcctggctggaagctgcgtgtgcttctggcgcaggcgctgtttgctgatccggatattctcctgctcgacgaaccgaccaacaacctcgacatcgacaccattcgctggctggaacaggtgctgaacgagcgtgacagcaccatgatcatcatcagccacgaccgtcacttccttaacatggtctgtacccacatggcggatctggattacggcgagctgcgcgtttatccgggtaactacgatgagtacatgacggcggcgacccaggcgcgtgaacgtctgctggccgataacgccaagaagaaagcgcagattgctgagttgcaatctttcgttagccgctttagcgccaacgccagcaaatctcgccaggcaactagccgcgcgcgccagattgataaaatcaaactggaagaggtgaaagcctccagccgtcagaacccgttcatccgttttgaacaggataagaaactgttccgtaacgcgctggaagtggaaggtctgaccaaagggtttgataacggtccgctgtttaaaaatctcaacctgctgctggaagtgggtgaaaaactggcggtactgggtaccaacggcgtcggtaaaagtacgctgctgaaaacgctggtgggcgatctgcaaccggacagcggcaccgtaaaatggtctgagaacgcgcgcattggttactatgctcaggaccacgaatatgagtttgaaaatgatctgaccgtgttcgaatggatgagccagtggaagcaggaaggcgatgacgagcaggcggtacgcagtattctcggtcgtttgctgttcagccaggacgacatcaaaaagccagctaaagtgctttccggtggggaaaaagggcggatgctgtttggtaagttaatgatgcagaagccgaacattctgatcatggacgaaccgaccaaccacctggatatggaatccattgagagcctgaacatggcactggaactgtatcagggcacgctgatctttgttagtcacgaccgtgagttcgtaagctccctggcgacccgcattctggaaatcaccccggaacgcgtgatcgactttagcggtaattacgaagattacctgcgtagtaaagggatcgagtaagtgattatccgtcaccccgatactgtcggggtgacggcggctgatgacaaatgcaaaatagcctgatgcgctacgcttatcaggcctacgcagtacctgcaatatattgaatctgcaggactttgtaggccggataaggcgttaacgccgcatcaggcattaacaaagcgcatttgtcagcaatctgagtaacgtcgaatcgattttcttaatcccacatcaattcacttccattaattctcaaacatccatgcccaacgctcgcttaccgtgaatgttgaggtcggcaagcgtaaagcgtccttcccagtttgtttcatagtcctcgcgcgggaagtcgcccgggcttgcgcctttttccagtgcggccttcaccttgtgcgcgtaggcaagatttttctcgcacatcggtgccgcaggaatgtacatcacgttgccccaaccttgttgattttcaacgggggcaacggaatggatgacgtcgcagtgccaccagacggagtctccggcttcgagttttggaatgctggttaacgcctcaatcaacagtggatgccattgctcacttaccggcaatactcttccgggcgctacgccgcacagttcatcctccggcacatcatcaagcagcggacgtaacagtacgtacgccatagcttcaggaatgggcacgacgtgcagcagcccctgaccaggcagcatatcagagagcgctgtccagccctggaatgtccgaaacacggaacatttggtggtgttgtccaccgtgtactcttcaacttccgtacgatgtgccgcatgccagggatcatattgcgccagattgccattaaagacgttggcgaaaacgcgctgatacgctggaagcagccagcgttccagtgccccggagtcggtatgcgctccaagacctttggaggtcgttccgggcggacggcggcggatacggtcagggtagatgacgctcacatccgggttaaaccattgctttccatcactttcaaatgtccacagacgattgagaaagctctgcgcattcgccatttcttcactctggcgggcctgcatttgcgcctggctccagtagatggggtaaatctcgggacgactagcgctgagcgtcccgaagaaattatcgccggggcctttgtagacctcgtcaaagcggttgcggtccagatagtccagcatgctctgatcccagcctagcgcttgttcgcgggggaaatggccttttatcaccgcacaaccgcgacgtttaatctgttcgcgctgctctgcagtaacatgacctgctttgatatcggcataagacagcaccggccagacggcatcgccctgtgctttgagtgcgttgatttcagccactcgcgtggcaatgtcatcgcttagctgattaaagatctgctggacgtcgccaagctgcgcccgcagcgcgtgcttcatctgacggatagctgctttgtgatcggcaggcaatgtgtcgctggtaaaagtagaagccataaccacctctcattaactttcattcgaaaccattctgatttgcatgtgacaatataagttataaataagttaatgcaagtttaatgatttgatgtgatgtacaggatgtaaaaagaagggaaaaccggagcgcacggctccggtagagaggtcagctgttaaaaggggatgtgttatccagcaccgcctgaatcacattcagcgcgccttcatgattattatcatcggtagcgtaacgggcgatttgtttaatgttttccgcagcattgcccatcgcaaaggaataacgcgccattttcagcatctccgcatcgttaccgctgtcgccaatcgctaccacattttgcggactcagatcccagcgtttcagtaaccggctaataccgtttgctttatgtagaccgggaataatcaggtcgataaagccaaaaccactggtaacgggtttcataatgccatcgagcgctacgtgcagtttgtcgatcactaacgggatttgttcatccggcaggttgaggctaaacttgaacagtacgtcgtcaatctcctgataatcttttacaggtttcaggcgatggtagtgttttgccatcagtgcgacaaatgcttcgggggcattttcgctgacatatgcactttgcagaccgcaggcgacaaaattgagttgcttatcttttagcaactcgccaataacaatccggctttcatgtcgggtcagttcgccgtggaacaactgcttgccatgttcgtaaaccagtgcgccgttttccgcgacaaaagagatctcatcctttagctcaggaaagaaactaataagctggtaatactgattaccgctggcaacaacgaacttaatgccgcgctttttcagttcctgatattgcgccataaaacgtggttggttgtacgttttggcgtcgttaagaaaagtaccgtccatgtctgtgacgataacttttacgctcataggtgtgctcctggctcgaaaatgaaaccgtaacagtgtaataacaatgtgacgcagagcacaaattatatttcgaatgaaagtaaggatgaaattgatgatgtgaatgatttagcccggcgacgacgccgccgggccgaggagattacagcatatgttcagtacgggcgatgatatcgtcctgagcgtctggagagagcgcggtgaagaacgcggaatagcccgcgacacgcactaccagatcgcgatactgatcgggatgttttttcgcatccagcagcgtttcgcgggaaacgatgttgtactgaatatgccagcctttatgcacttcaaagaaggtacgcagcaggatcatcagtttctgcttgtcagattcgttctccagcgttgccggattcagtttctggttgagcaacacgccgccgagaatcgctgccgtaggcagtttacccacactgccaatgaccgcagtagggccaagatggtcagtaccggaggccgggcttgcgccttctgccagcggggtgtgggctttacgcccgtccggtgttgccatagtctgcgcgccaaacggtacgttagcggagatactactcgtacccgcgtaatagttgccgccaaccggaccacgaccgtagcgcggattatggtactgtttcagttcgtcgatataggtctgataagcgcgagccagcagcgtatcgacagtatcatcgtcgttgccgtacttcggcgcaccgttaatcagccgctgacgcagctgctcgtgagtcaggccgtcgaagtcatctgccagtgcggcagcaagctgttgctgaccaatcgcaccttgttcaaacaccagtttcttcactgccgccaggctgttgccgaggttggcaatgccgacctgcaggccagaaacccagtcatatttcgcgccgccttgcttgatacttttcgctcgctcaatacagtcatccaccagcgcgctgcagagaatatcgtgcacgttctcttccagcatggtgtcgacgacatattcgatttcgatacttttgcgggtgtagtaacggatttgcgtatcccacgcgtccatcacttcatcgaagttgttgaagttacctgcgctcaacgctttttcttgtggcaggaacactttgccgctggtggcatcatgcccgccttccagcgccgccagcatcacgcgggcgaagttgataaagctcatgccggtacagcgatagccccatttgccaccgacggcggtttctatacaaccaatcgctgcgtagtcataagcgtcctgcggttcaataccgagtttaataaattccgggatcacgatttcgtcgttgttgaacgccggcatcccgaagccgcaacggatcacctgtacgcaggcgtcgaggaaatcgttgctcattcctgcatggtaacgcacgctgaggttaggctgagtggaacgcaggcgaccgcaggattcgaggatcgcgtaagagagtggattcaccgcgtccattggttgaccatcaaccagattttgcccgccaatagtgacgttctgatacagcggacttcccgcagaggctttactgtgactgccggagcggatcttgttcacttccagcagtttcagccagcagctatgcagcatctcgatggcgtgttcgcgatccagcgtctggttgagttcaacgtcgcggcgatagtacgggtagagatactggtccatacgaccaaagcttacactgtgaccgttagattcgatctgcaaaatcaactggatgaagtaacacagttgcagcgcctgccagaaagtctgcggcggctggtgggcgataagatcgcagttttctgccatcgccagcagttcatcgcgacggctttcgcgggtttcggtcgcggccatttcacgcgccagggcagcgaaacgttcaatgtgttcactgactgccaccagcacgatatcaatcgctttcaggaattgctcaccgtgtaaatcttccagcaccgtcaggttgatgcggctgcgacgttccgctacttcctcgcgcagaccatcaagccctttttccagcagcagcgggaaattcaccgccaggtgcgcatcgccggaggtcatattgccttccgctttaatgattccggtcgccagcagacctttttgctcatcggtaaacatgccgtagcagcgatcctgtacggtctgaccgcgccaccacgggcacacttcatgcagaacgcgtttgttctcttcgctcaccgcaaagccagcaccgggacgatctgccagatcatcaatctctttttcgatccagctgacagtatattccgggaagatcggcgcggcgcgaacttcgcttgcctggttgccaatgatcaactcatcgtgtttgatccagatggtgcgattcgccaggtgatgcgccagtgccagcgcgcgacgtaccgggatcggcttatcgagatgttgttgatacatctcggtatagtgctgcgcgcgctcggtacagactggcggtttcacaatatgcaccagcgcatttttgtgcgctttaatgcggtcgctgagcgtgtccagtttcagtgtggtcatggttgttatcctcgtaaggtcgcggttaaccctttctggcaggcatactgctgggcaaagtcgagcagttctggcgcatcaagcggtttttccggggcgtcatagggcagattaagtaagtgatatttgttgatgcccagcgtgtggtagggcagaaaatgaatttcgccaacgtgcagctcgtcggcggcaaaatcggtaatggcttttacagaggtttcgtcggcattaaagccctgaatcagcggcacgcggataatgatttttttgcccgctgcggcgagttttttcaggttatccagcactctggcggcgttaccgtcggtccactgtttaaacggcgcgtcggcaacgtgttttaaatcggcaagaaacagatcgatatagggcagagaaggggcgatatatttccacggcacatgcagacaggtttctaccgcagtatgaatgcctgcctcgtggctggcttgcagtagcgccatcgccatttccggctgcataaagggctcaccaccgctaagcgttaaaccgccgccgctgcgatcgtaaaacggtttatcgcgcagaacggtcgtcatgatctcctcaacgcttttcacttcaccacacacggttaatgcctgtgtcggacagcagtcggttaacgccgtcagatgctccggggttaacttttcccgatgaataagcaaaccattcagcgcgcgctcaatcacttccggcgcggccttagcgcacagctcgcagccttccagacacagtcgtgcgtcatacagcagatcctgcgtgcgggcgcggctttccgggttctgacaccagcggcagcccaggctacagcctttaagaaatacgaccgtgcggataccggggccatcatgggtgctgtagcgctgaatattgaaaatcatagttgcctctctatttcgttcaagcattaaaatactttcgaatgaaagttagattgatgtgcgtcaactgttcagagagttttcccgtgatagtctacattcagacaaaaagtacattttgaggatggttatggaactgtatctggatactagtgacgttgttgcggtgaaggcgctgagtcgtatttttccgctggcgggtgtgaccactaacccaagcattatcgccgcgggtaaaaaaccgctggatgttgtgcttccgcaacttcatgaagcgatgggcggtcaggggcgtctgtttgcccaggtaatggctaccactgccgaagggatggttaatgacgcgcttaagctgcgttctattattgcggatatcgtggtgaaagttccggtgaccgccgaggggctggcagctattaagatgttaaaagcggaagggattccgacgctgggaaccgcggtatatggcgcagcacaagggctgctgagcgcgctggcaggtgcggaatatgttgcgccttacgttaatcgtattgatgctcagggcggtagcggcattcagactgtgaccgacttacaccagttattgaaaatgcatgcgccgcaggcgaaagtgctggcagcgagtttcaaaaccccgcgtcaggcgctggactgcttactggcaggatgtgaaagtattactctgccactggatgtggcacaacagatgattagctatccggcggttgatgccgctgtggcgaagtttgagcaggactggcagggagcgtttggcagaacgagcatttaaccggacgttctgcatcctcataaattgctgatgacgtggcggagtgccgcgtcttatcaggcctggaggtggcaattactgcccacacacctcacaccccggattacgcatcagtttcatttcgcgaaactgacaggtcatcgcatcgtacatgacgattttcccgctggccggtttgccataacctgccagcattttgatcgcttccattgcctgcaagctaccaattacgccgatcaacggtgccattgcgcctgcttccacgcaggttaatgcattttcaccaaacaaacggctaaggcagcgatagcacggttcaccgtcctgataagtaaagacggtgatttgaccttccatacgaattgccgcgccggaaaccagcggtaccttcgcggcaaaacagcctgcgttcagttgattacgtaccgcaacgttatccgtacagtcgagcaccagatcgtgttcagcaatcaatgctgcaagttctgcgtcatccagcagtgcattgactggcgtaatcgcgatatgtgggttgatccgcgtcagggcgtcacgggcggattccaccttcggttgcccgaccgtggcatcactgtgcagtgtctggcgttgcagattgctgaggctaaccgtgtcgaagtcgagcagcgtcaggttaccgacaccggcgcttgccagatactggctggctgcacagccgaggccgcccaggcccactatcagcacgcgagaatctttcagcgcctcctggccgtcaaaatcaaagccgcgcagaatgatttgccggttgtagcgcagcatctcctgatcgctgagttccgccattacaggcctccgaacaacgcgttaaacggttctacttccacccattcgcccacttccacattgccgcgatcgcgttccagcacgataaagcagttgccgaggctaaaggagctaaatatatgactaccctgatgtccggtggtcgtcacttccagttcgccatcggcgttgcgttgcagcacgccgcgctggaaatcaagacgtcctggcgtttttttcaggcgggacgctgtgcgtacgcgctggcgcgcgggcaggccgctggcggtgttaccgcttagttttgccagcaaaggctgtaccagttgatagaaggtcagcgtcgcactaaccgggttgcccggcaggccgcagaaccagctattgctgagtttaccgaacgcgaacggtttacctggtttaatcgccagcttccagaaggcgatctcccccagctcttcaagaatcgttttggtgtaatccgcctcacccacactaacaccgccggaactgatcaccacatccgcctggctgtcggcttcaataaatgcggcgcgcagggcatggggatcgtcgcggataatccctaagttaattacctcgcatcccaactgttctaacatcaggtgtacggcgagacggttggtatcgtagatttggccgtcgcccagcggctgaccgggcaactggagttcatcaccggtagaaaaaagcgctacacgcactttacgaatcaccggaacttcggcaatccccagactagcaattactggcagctctgcggtagtcaggcgagttcccgccgggaaaacaaccgcacctgcagagatatcttcaccgcgacggcgaatattttgcccgctacgcacttcagcagtaaaacgcacgccattgtccatttgttcagtctgctcctgcatcaccaccgcttcgcagccttccggcaccggcgcaccggtcataatacgaatgcaggtacccgcaggccattcaccatggtatggctgaccggcaaaggatttaccggcaacgggcagcggttgcccggaggcaatatcggctaaacgcaccgcgtagccgtccattgcggagttatcaaaccccggaacatcaagcgggctaacgacatcgctcgccagaatacgaccaaaacactgtaccagtggcagcgtttcctgggcggtcagtggggtgacgcgagaaagcatctcattaagcgcggtgtcgaggctcatcaatccggtggtaaattccatgaaaacactcctgcggaggcaaaatcgaatttgcctattatgtcagaaaaacgccacagactgtatgccacctcgggcgtagcgctgggtcctgcctttacatgccatatccatctttctatattcaaaaattgaatgagtaattcataaaaattctgatatttatagcaaaagtggcgaaccacccttaatggacgaatactatgggcaaagcagtcattgcaattcatggtggcgcaggtgcaattagccgcgcgcagatgagtctgcaacaggaattacgctacatcgaggcgttgtctgccattgttgaaaccgggcagaaaatgctggaagcgggcgaaagtgcgctggatgtggtgacggaagcggtgcgtctgctggaagagtgtccactgtttaacgccggaattggcgctgtctttacgcgtgatgaaacccatgaactggacgcctgtgtgatggatggtaacaccctgaaagccggtgcggtggcgggcgttagtcatctgcgtaatccggttcttgccgcccggctggtgatggagcaaagcccgcatgtgatgatgattggcgaaggggcagaaaattttgcgtttgctcgtggcatggagcgcgtcagcccggagattttctccacgtctttgcgttatgaacaactactggcagcgcgcaaggaaggggcaaccgtcctcgaccatagcggtgcgccactggatgaaaaacagaaaatgggcaccgtgggggccgtggcgttggatttagacggcaatttggcggcagccacgtccacaggcggaatgaccaataaattacccggacgagttggcgatagtcccttagtgggtgccggatgctacgccaataacgccagtgtggcggtttcttgtaccggcacgggcgaagtcttcatccgcgcgctggcggcatatgacatcgccgcgttaatggattacggcggattaagtctcgcggaagcctgcgagcgggtagtaatggaaaaactccctgcgcttggcggtagcggtggcttaatcgctatcgaccatgaagggaatgtcgcgctaccgtttaacaccgaaggaatgtatcgcgcctggggctacgcaggcgatacgccaaccaccggtatctaccgtgaaaaaggggacaccgttgccacacagtgatgaacttgatgccggtaatgtgctggcggttgaaaatctgaatattgcctttatgcaggaccagcagaaaatagctgcggtccgcaatctctcttttagtctgcaacgcggtgagacgctggcaattgttggcgaatccggctccggtaagagtgtgactgcgttggcattgatgcgcctgttggaacaggcgggcggtttagtacagtgcgataaaatgctgttgcagcggcgcagtcgcgaagtgattgaacttagcgagcagaacgctgcacaaatgcgccatgttcgcggtgcggatatggcgatgatatttcaggagccgatgacaagcctgaacccggtatttactgtgggtgaacagattgccgaaagtattcgtctgcatcagaacgccagtcgtgaagaagcgatggtcgaggcgaagcggatgctggatcaggtacgcattcctgaggcacaaaccattcttagtcgttatccgcatcaactctctggcgggatgcgccagcgagtgatgattgcgatggcgctgagttgccgcccggcggtgctgattgccgatgagccaaccaccgcgctggatgtcactattcaggcgcagatcctgcaattaatcaaagtattgcaaaaagagatgagcatgggcgttatctttatcactcacgatatgggcgtggtggcagagattgccgatcgggtactggtgatgtatcagggcgaggcggtggaaacgggtaccgtcgaacagatttttcatgcaccgcaacatccttacacccgtgcgctgttagctgctgttccgcaacttggtgcgatgaaagggttagattatccccgacgtttcccgttgataagccttgaacatccagcgaaacaggtcccccccatcgagcagaaaacggtggtggatggcgaacctgttttacgagtgcgtaatcttgtcacccgtttccctttgcgcagcggtttgttgaatcgcgtaacgcgggaagtgcatgccgttgagaaagtcagttttgatctctggcctggcgaaacgctaagcctggtgggcgagtctggcagcggtaaatccactaccgggcgggcgttgctgcgcctggtcgaaagccagggcggcgaaattatctttaacggtcagcgaatcgataccttgagtcccggcaaacttcaggcattacgccgggatattcagtttatttttcaggacccttacgctagcctggacccacgtcagaccatcggtgatagcattatcgaaccgctgcgtgtacacggtttattgccaggtaaagacgcggctgcacgcgttgcgtggttgctggagcgcgtgggcctgttacctgaacatgcctggcgttacccgcatgagttttccggcggtcagcgccagcgcatctgcattgctcgcgcgttggcattgaatccaaaagtgatcattgccgacgaagccgttagcgcgctggatgtttctattcgcgggcagattatcaacttgttgctcgatctccagcgtgatttcggcattgcgtatctgtttatctcccacgatatggcggtggtagagcggattagtcatcgtgtggcggtgatgtatctcgggcaaattgttgaaattggtccacggcgcgcggtcttcgaaaacccgcagcatccttatacgcgtaaattactggcggcagttccggtcgctgaaccgtcccgacaacgaccgcagcgtgtactgctgagcgacgatcttcccagcaatattcatctgcgtggcgaagaggtggcagccgtcagcttgcaatgcgtcgggccggggcattacgtcgcacaaccacaaagtgaatacgcattcatgcgtagataacattcaggcggagaataaaatggcaagagctgtacaccgtagtgggttagtggcgctgggcattgcgacagcgttgatggcatcttgtgcattcgctgccaaagatgtggtggtggcggtaggaagcaatttcaccacgctcgatccgtatgacgcaaatgacacgttatctcaggccgtagcgaaaagcttttaccaggggctgttcggtctggataaagagatgaaactgaaaaacgtgctggcggagagttataccgtttccgatgacggcattacttacaccgtgaaattgcgggaaggcattaaattccaggatggcaccgatttcaacgccgcggcggtgaaagcgaatctggaccgggccagcgatccggcgaatcatcttaaacgctataacctgtataagaatattgctaaaacggaagcgatcgatccgacaacggtaaagattaccctcaaacagccgttcagtgcgtttattaatattcttgcccatccggcgaccgcgatgattagtccggcagcgctggaaaaatatggcaaggagattggtttttatccggtgggaaccggaccgtatgaactggatacctggaatcagaccgattttgtgaaggtgaaaaaattcgcgggttactggcagccaggattgcccaaactggacagcataacctggcgtccggtggcggataacaacacccgcgcggcaatgctgcaaaccggtgaagcgcagtttgctttccccattccttacgagcaggccacactgctggagaaaaacaaaaatatcgagttgatggccagtccgagtattatgcagcgttatatcagtatgaacgtgacgcaaaagccgttcgataacccgaaggtccgtgaggcgctgaattacgccattaaccgtccggcgctggtgaaagttgcctttgcgggctatgcaacgccagctactggtgtggtaccgccaagtatcgcctacgcgcaaagttataaaccgtggccttacgatccagtgaaagcgcgcgaattactgaaagaggcgggatatcccaacggtttcagtaccacgctgtggagcagtcataaccacagcaccgcgcagaaagtgctgcaatttacccagcagcagttagcgcaggtcgggattaaagcccaggtgactgcgatggatgccggacagcgggcggcagaagttgaaggtaaagggcaaaaagagagcggcgtgcggatgttctacactggctggagcgctagtaccggcgaagcggactgggcactaagcccgctgtttgccagccagaactggccaccgacgctgtttaataccgcgttttacagcaataaacaggtggatgacttcctggctcaggcactgaaaactaatgatccggcggaaaagacccgcttatataaggcggcgcaggatatcatctggcaagaaagcccgtggatcccgctggtggtagaaaaactggtgagcgcacacagtaaaaacctgaccggtttttggatcatgccagacaccggcttcagctttgaagacgcggatttgcaataagcaacgcagggagtggaatgcttaattacgttatcaaacgcttactggggttgattccgacgctgtttatcgtcagcgtgctggtgtttttatttgtccatatgctgcccggcgatccggcgcgattgattgccgggcccgaagctgatgcgcaggttatagaactggtgcgtcagcagctggggttggatcagccgctgtatcaccagttctggcactatatcagcaatgctgtgcagggggattttggcctgagcatggtgagccgtcgtccggttgccgatgagattgccagccgctttatgccaacgctgtggctgaccataaccagtatggtctgggcggttatatttggtatggcggcgggaattatcgccgccgtctggcgtaaccgttggccggatcgattgagtatgaccattgcggtgagcgggatcagctttccggcatttgctctggggatgcttttaattcaggtattctccgttgaactgggctggctgcctaccgtgggagcagacagttggcagcactacattttaccctccctgacgctcggcgcggcagtggccgccgtgatggcgcgctttacccgcgcgagctttgtcgatgttttaagcgaagattatatgcgtaccgcgagggcgaaaggggtgagcgaaacctgggttgtcctcaaacacgggctacgtaacgcgatgatcccggtagtgaccatgatgggcttacagtttggctttttgctcggtggttccatcgttgtggagaaagttttcaactggccgggacttggacgcttactcgttgactccgtagaaatgcgtgattacccggtgattcaggcggaaattctgcttttcagcctggaatttattcttatcaacttagtggtggatgtgctttacgccgccattaacccggctatcaggtacaagtaaggatgcgactatttaactggcgacgtcaggcggtgttaaacgccatgccactggtcaaacctgaccaggtacgtacaccgtggcatgaattctggcgacgatttcgccgtcagcatatggcgatgaccgccgcattattcgttattttattgattgtggtggccatttttgcacgctggatcgctccctatgacgccgaaaattattttgattatgacaatctgaataacggaccttctttgcagcactggtttggcgtcgatagtctggggcgtgacattttcagccgtgtcctggttggtgcgcaaatcagcctggcggcgggcgtgtttgccgtgtttatcggtgcggcgatcgggacgttgctgggcttgctcgctggatattatgaaggctggtgggatcggctgatcatgcgcatttgcgatgtgctgtttgccttcccgggtattttactggcgatcgctgttgttgcggtgttgggaagcggcattgctaacgtgattattgcagtcgccattttttccatccccgcgtttgcccgcctggtgcgcggcaacacgctggtgttgaaacagcaaacctttattgagagtgcacgcagtattggtgccagcgatatgaccgttttgttgcgtcatatcctgcctgggaccgtctcttctatcgtggtgtttttcaccatgcgcattggtaccagcattatctctgccgccagcctcagttttctcggcctcggtgcgcagccgccgacaccagagtggggagcaatgctcaatgaggctcgagcggatatggttatcgcgccgcatgtcgctgtttttccggccctggctatttttctgaccgtactggcgttcaatttgttgggcgatggtttacgcgatgcgctggatccgaaaattaaaggataattacgtttgaatattgcttgaaagggtaatcacctcacaggaaattattgccctaagcaagtgttgtaactttctgctgattttgtagaatcgggtaatttggttaaaaagccgcagcaagggacaatttttgcagcggcacagcgttcagatagttattttgttaaatgtattaacatgctgagtttatacgaaaagataaagataaggctgataattttatttttattggcagcactgagttttattggtctttttttcatcattaactatcaactggtaagcgagcgcgcggtaaaacgtgccgatagccgctttgaacttattcagaaaaacgttggctatttctttaaagatattgaacgtagcgccctgacattaaaggacagtctgtatttattaaaaaatacagaggagattcaacgcgccgtgattcttaaaatggaaatgatgccatttttagacagcgtgggactggtacttgatgataataaatattatctttttagccggagggcgaatgataaaatcgttgtttatcatcaggaacaagtaaatggaccgcttgtcgacgagagtgggcgggttatttttgccgattttaacccaagcaaacgaccgtggagcgtggctagtgatgactctaacaacagctggaatccggcatacaattgctttgatcgtccgggtaaaaaatgtatctcttttacgctacacatcaacggcaaagatcacgatttgttagcggtggataaaattcatgtcgatttaaactggcgatatctgaacgagtatcttgatcaaatcagcgctaatgatgaagttctatttttgaaacaaggccatgagatcattgccaagaatcaactcgctcgtgaaaaactgattatttataatagcgaaggtaattataatattattgattctgtcgatactgaatatatcgaaaaaacaagtgcggtgccaaacaacgcattattcgaaatctatttttattatcctggcggtaatttattgaacgcaagtgataaacttttttatctgccgtttgcgttcattattatcgtattgctggtggtttatttaatgaccactcgtgtgttccgtcggcaattttctgaaatgacagagctggttaatacgctggcgtttttgcctgacagtacggatcaaatcgaggctctgaaaattcgtgaaggcgatgcgaaagagattatcagcatcaaaaatagcatcgcggaaatgaaagatgccgaaattgaacggagtaataaattgctcagtctgatctcttacgatcaggaaagtggttttattaaaaatatggcgattattgagtctaacaataatcagtatctggctgtggggatcatcaaactgtgtggtctggaagccgtggaagcggtgtttggtgttgatgagcgcaataaaatcgtcaggaaattgtgtcagcgaattgccgagaaatatgcgcaatgctgcgatatcgtgacattcaatgccgatctctatttacttctgtgtcgggaaaatgtacagacatttacccgtaaaatagcgatggtaaacgattttgacagcagctttggctaccgcaatctgcgcatccataagtctgccatttgtgaacctttgcagggggaaaacgcctggagttacgcagaaaaactgaaactggcgatttccagtatccgtgaccatatgttcagtgagtttattttctgtgatgacgcgaaactcaacgaaatagaagagaatatctggattgcgcgtaatattcgccatgcaatggaaattggcgaactattcctcgtctatcaaccgatcgttgatattaacacccgcgccattctgggcgcggaggcgttgtgccgttgggtgtctgcggagcgggggatcattagtccgctgaagttcattaccattgctgaagatatcgggtttatcaatgagctgggttatcagattattaaaacggcaatgggtgaattcagacattttagtcagcgtgcgagcctgaaggatgatttcttactgcatattaatgttagcccctggcagttaaacgaaccacactttcatgagcgttttaccaccatcatgaaagaaaatggcctgaaggcgaacagcctctgtgttgagatcactgaaaccgtgatcgagcgaattaatgaacatttttatctcaatattgaacaactgcgtaaacaaggggtacggataagcattgatgactttggcaccggtttgagtaacctgaaacgtttttatgaaattaatccagacagcataaaggtggacagccaattcaccggcgatattttcggtactgcgggaaaaattgtgcgcattattttcgacctggcacgctataaccggatcccggtgattgcggaaggcgtagagagcgaagacgttgcgcgcgaattaatcaaattaggatgtgttcaggctcaggggtatctgtaccagaaacccatgccattctccgcctgggataaaagtggaaaattagtaaaagagtaatttacgtatgtccagaatcaataagttcgtacttacagtcagtctgctgatttttatcatgattagtgcagttgcctgcgggatctacactcaaatggtaaaggaacgggtgtatagcctgaaacagtccgttattgatactgcttttgcggtggcaaatattgctgaatatcggcgtagcgtggcaattgatcttatcaacacgctaaatcccacggaggaacagctgttggttggtttgcgcacagcttacgccgacagcgtttccccctcttatttgtacgatgtcggtccttatctgatttccagtgacgaatgtattcaggtaaaggagttcgagaaaaattattgtgcagatattatgcaggttgtgaagtatcgacatgtcaaaaatacagggtttatctcttttgacggtaaaaccttcgtctattacctctatccggtaactcacaatcgtagtctgatatttttgcttggtctggagcgtttttctttactgagtaaaagcctggcgatggacagcgagaacctgatgttctctctatttaagaacggtaaaccggtgaccggtgatgaatataatgctaaaaacgccatcttcaccgttagcgaagcgatggagcacttcgcctatttgccgaccggattgtatgtatttgcgtataaaaaagatgtttatttgcgggtttgtacattgattattttctttgccgcattggtggcagtgataagcggtgccagttgcctctatctggtacgcagagtgattaatcgtggtattgtggagaaagaagccatcattaataaccattttgaacgcgtactggatggcgggcttttctttagcgctgccgatgtcaaaaaactctacagtatgtataacagcgcgttcctggacgacctgaccaaagcaatgggcagaaaatcctttgacgaagatttaaaagcgctgccggaaaaaggcggttatttgtgcctgtttgacgtcgataaattcaaaaacattaacgacaccttcggtcatttgctgggcgatgaagtgttgatgaaagtggtgaaaatccttaaaagtcagatcccggtagataaaggtaaagtctaccgcttcggcggtgacgaatttgcggtgatttatacgggtggaacgctggaagagttgctaagcattctaaaagaaatcgttcatttccaggtgggaagcattaatttaagtaccagtatcggtgtagcacatagtaatgaatgtcctaccgtcgaacgcttgaaaatgctggcggatgagcggctgtataagagtaagaaaaacggcagggcacagattagctggcagtaatcattattcgcaggccggacaaatgattttgcccggcctgaattaattaaacccggctaccccacaaatcgtactcatcggcgtgctcgactttcacacgcaggatatcacccggcttaacgttggtttcaccattgagataaaccgcgccgtcgatttccggtgcatctgccatgctgcgaccaatcgcgccttcttcgtccacttcgtcgataatcaccagaatttcacggcccactttctcttgcaggcgctcggcggaaatctgctgctgcagctgcatgaaacggttccagcgttcttctttaacttcttccggaacctggtcaggcagggcattggcgtctgcaccttcaaccgggctgtatttaaagcagccaacgcgatccagacgcgcttctttcaggaagtcgagtagcatctggaaatcttcttctgtctcgccagggaagccgacaataaaggtactgcgtagggtcagttccgggcagatttcgcgccactgtttgatgcgcgccagttggcgatctacagaacccggacgcttcatcagtttgagaatgcgcgggctggcgtgctgcaacggaatgtccagatacggcaggattttgccttctgccatcagtgggatgacgtcgtccacatgcggataagggtaaacgtagtgcagacgtgtccagatccccagtttgcttaactgttcgcacaggctgaccatgctggtttttaccggctcgccgttgtggaagccagtacgatgtttaacatcaacgccataggcggaagtatcctggctgatcaccagaatctctttaacgcccgcatctaccagacgtttcgcttcacttaacacttcgccaatcggacggctcaccaggtcgccgcgcatagacggaataatgcagaaggtgcagcggtgattacagccttcagaaattttcagataggcataatgacgcggcgtcagtttcacaccttgttctggcaccaggctcaggaatgggttgtgtttcggttttggcacgtagtgatgaacgtgctccagaacctgctcatagctatgaggcccggtgatttccagcactttcgggtggacttcgcggatctgatcttcttttgcccccagacaaccggtcacaataaccttgccgttttcattcaacgcttcaccaatggcttccagactttcttgtaccgcgctgtcaataaagccgcaggtgttgacgatcaccatgtccgcatcgtcatagctcggtaccacgtcataaccttcagtgcggagttcggtgagaatacgctcactatcaacaaggtttttcggacagccaagggaaacaaagccgattttcggctggggagttactttgctcatagcttaaaaaatattcagttacaggaaaggtcagggcagggattctacagagttctggataaaatttgtatcgcaatctcattcgctggcggaggcgaaggaaatgtaaattttgttaattcggcgtgaagaattgatcctggacagcattttgctcaaaaaatagccatactatttaattgcaacaaggctgggaagaggaggatcgaagtatgttcgttgacagacagcgaatcgatctgctgaaccggttgatcgacgcacgcgttgacctcgccgcatacgtgcaactgaggaaggcaaaaggatacatgtccgtcagcgaaagcaatcatctacgagataacttttttaaactgaatcgcgaactgcacgataaaagcctgcggttgaatcttcatctggatcaggaagagtggagtgctcttcatcatgctgaagaagcattagcgacagccgcagtatgtttgatgagtgggcaccatgattgcccgactgttattaccgtcaacgccgataagcttgaaaattgtctgatgagcttaacgctgagtatccagagcctgcagaagcacgccatgcttgagaaggcctgaaaactaagggggagaaagcgtctcccccttcatgtttaagtttttgtaaaaatgaatttgttatctcctccactgactacgctttaagccagagtcaatccggaggcgttatgcatcgacaatcctttttccttgtgccccttatttgtctttcttccgctctctgggcggctcctgcaacggtaaatgtcgaagtactgcaagacaaactcgaccatccctgggcactggcctttttacccgataatcacggtatgttaatcactctgcgcggcggcgagttgcgtcactggcaagcaggaaaaggattatctgcgccgctttccggagttccggacgtttgggcgcacgggcagggcggcctgctggacgtggttttagcgcctgattttgctcagtctcgccgcatctggttaagttattccgaagttggcgatgatggcaaagccggaactgctgtgggttatggccgcttaagtgatgatctcagtaaagtgaccgacttccgcaccgtctttcgccagatgccaaaactgtctaccggcaaccattttggcgggcggctggtattcgacggtaaaggttatctttttattgctctgggcgaaaacaatcagcgcccgacggcgcaggatctggataaattacagggcaaactggtgcgtctgaccgaccagggcgaaatcccggatgataatccttttataaaggaatccggtgcgcgcgccgagatctggtcttatggcattcgtaatccgcaaggaatggcgatgaatccgtggagtaatgcactgtggctgaatgaacatggcccgcgcggtggtgatgaaattaatatcccgcaaaaaggcaaaaactacggctggccgctggcaacctggggaatcaactatagtggctttaagataccggaagcgaaaggggagatcgtcgccgggaccgagcaacctgttttttactggaaagatagccccgctgtgagcggcatggccttctataacagcgataaattcccccagtggcagcaaaaattatttattggcgcgctgaaagataaagatgtcattgtgatgagcgtcaacggcgacaaagtgacagaagatggccgtattttaacggacagagggcagcgaattcgtgatgttcgcactggacccgacggttatttatacgttctcaccgacgagtccagtggggaattacttaaagttagcccacgcaattaactaacgggaatcatcaccactttgcgcactgcggggcgttcagtgagttgctgataccagcgttgcagatttggacgcggtgtccaggtcaggccaacgttaaacaaattgtagatgaacggtgcgatagcgatatcgcccacaccaaactcgtcgccagagaaccattttacttttgccagttccgcatcgagcagggcaaacagggcgtcgcactctttgcaactggcatcaatggcggcctgatcgcgctcttccggtggtgttctgactaatcccatcaggatcccgcgatgagcattactgagcgtctggtttgcccagtccatccatttttccgcttccgcacgacgtgccggactgtcgatccacaggcgtttttgcccgtactgtgccgccagatagcggacaatggcgttactttcccaaagaatgagatcactttcgtcgtcacgcaacaacggcaccagcccgttagggttcatcgccagaaaatcagcatcgtgatttatcccaaactcacggcccgcgagaatttgctcataaggtagttccagttcttcgagcgtcagcaatactttttttacgttagtactattattccgaccccacagcgtaatcatactcaccccttttccgacaggcagccacaggctgaacaggactccgatggtgaagtaaagttaacttttaagcaacagctggcaaaaaaatgacaccagaagcagcgaagcggcaggatattgcataaactttaaaaactttaccaacttacggtttctttaagtttgtgtgtgcgttattaatcaccaaacttatcatacggcgatataacgtattttttttgaatggatactcgggtggcatttatgacgcaatactcctctctccttcgtggtcttgcagcgggttctgcatttttattcctttttgccccaacggcattcgcggcggaacaaaccgttgaagcgccgagcgtggatgcgcgtgcatggattttaatggattacgccagcggtaaagtgctggcagaaggcaatgcggatgagaaactggatcccgcgagcctgactaaaatcatgaccagctatgtggttgggcaggcgcttaaggccgataagattaaactcaccgatatggtgacggtcggtaaagatgcctgggcgacgggaaatccggcactgcgtggtagtagcgtaatgttcctcaaaccgggcgatcaggttagcgtggcagacttgaacaaaggtgtgattatccagtccggtaatgacgcctgtattgcgctggctgattacgttgccgggagccaggagagttttattggtctgatgaatggttatgccaaaaaactgggtctgaccaacactaccttccagacggtgcacggcctggatgcgccggggcagttcagcaccgcgcgcgatatggcattgctgggtaaagcattgatccacgatgtgccggaagagtacgccattcataaagagaaagagttcaccttcaacaaaattcgtcagcctaaccgtaaccgtctgctgtggagcagcaatctgaatgttgatggcatgaagacaggaaccacggcaggcgcgggatataatctggttgctagcgctacccagggcgatatgcgtttaatctccgtagtgttgggggcgaaaaccgaccgtatccgttttaatgagtctgagaaattattgacctggggtttccgcttctttgaaaccgtgacgccaattaaacctgatgccacctttgtgactcagcgcgtctggtttggtgataagagcgaagtgaatctcggggcaggtgaagcgggcagtgtgaccataccgcgtgggcagctgaaaaacctgaaagcgagttatacgttaacggaaccgcagcttaccgcaccgctgaaaaaaggtcaggttgtcgggaccattgatttccagcttaacggtaaatccattgagcagcgtccgctgatcgtgatggaaaatgtggaagagggcggattctttggtcgggtgtgggatttcgtgatgatgaaattccatcagtggttcggcagctggttctcttaatcttctgataaccggatggcgcgaaacgtcatccggttatacgtcattaatacatcaacttaatgcgctgcgtctgcgcgtacttcacatactcatcttccgggcaacaatcgctcaccacaatatcaaagcgtttcaggtcacccatgcgcgccggacgcaccttgccaaatttactgtggtcgacaaccagcacatgcttttgcgccatgctcatggcccagtgttttaccggcaactcttcaagattaaaacaggtagcgcctttactgacatgcacgcccgccgcagaataaaaagcgatatccgggcaaaaattattcagcgtttgctgaaaatcgatgggtttgaaaatggcgttgctggcgtgaaattcaccaccgcaaagaaacgcgcggcaatggggtttctctttcagcgccagaaaggtatttaggctataacaaacggcggtaaaagggatttcattatcaatcgcttcaataatccacggcgtggtggtgccacagtcaaaaaagagggtctgatcgggttctaccagcgtcgcagccagttttgccgcccggcgtttttcttccaccaggcgggatttttgatcgcttaacaggtaatggctggcactgcgcggttccagaacaatatagccgccgagcaaaacgacgggcgcactgtggttgttcagatcgcgacgaatcgtcatctcgctaaccccaagcagggcggcggcgtctttaagatgtaacttatcgctgcgttttaattcttgcagcagctgcccgatacgctcttcgcgacgtgtttccataatccctctgaatagttattgaagcgagccgctcaatactacactttttagcagagatcagtcacgcacccagcctttgcggatcggtaatgcaaaacagacgcgataccagctttgcagacgttgatagagtttatgccccatcgcttgccagataatctgggcactaaggcagccaatcatacctgccagcaatccaccgagcatatccagcggccagtggacgccaagataaacgcggctccaggcaatgacgacggccagcaccattaaaagactgccggaccacaggcgatgccagcataaaaatgccagtgcaaaggtgaaaatcaccgtaccgtgatcgcttgggaaactgtcatccgccgcatgatgcaggaagttatagccgatattttcgacaaagggtcggtcgtgcggaaaaagatgtcccatcgtccaggacacaaacaggctgaccgccagcgcgatagcgatttttatcaccagttgccgttgtgctgtaagcccccacaaccaaagtaccacggccagcaacggcaccacggtaatcaaatctttagcaataaaaatcgccaagctgatcatccacggagcgctgtctggcgtcgcgttaataagagagaatagagagagattcaaattttccagcataacttcccgacgcaaagtgattaaaagggagccaatacaggcaagtcgttgagaataaagtgcaggttaaactgggtaaagcggcatcgtcttatttccctcaagcggcctgtttacggtgggtgattgtaacgggcataggttaaataaaacttaaagaaagcgtagctatactcgtaataatgtaagaatgtgcttaaccgtggtttcagctacaaaattcgctttctcgttagctgcgcttttattaaactctgcgcgattattattggcgaagaaattgcatgcaaaataaattagcttccggtgccaggcttggacgtcaggcgttacttttccctctctgtctggtgctttacgaatttagtacctatatcggcaacgatatgattcaacccggtatgttggccgtggtggaacaatatcaggcgggcattgattgggttcctactagcatgaccgcgtatctggcgggcgggatgtttttacaatggctgctggggccgctgagcgatcgtattggtcgccgtccggtgatgctggcgggagtggtgtggtttatcgtcacctgtctggcaatattgctggcgcaaaacattgaacaattcaccctgttgcgcttcttgcagggcataagcctctgtttcattggcgctgtgggatacgccgcaattcaggaatccttcgaagaggcggtttgtatcaagatcaccgcgctgatggcgaacgtggcgctgattgctccgctacttggtccgctggtgggcgcggcgtggatccatgtgctgccctgggaggggatgtttgttttgtttgccgcattggcagcgatctcctttttcggtctgcaacgagccatgcctgaaaccgccacgcgtataggcgagaaactgagtctgaaagaactcggtcgtgactataagctggtgctgaagaacggccgctttgtggcgggggcgctggcgctgggattcgttagtctgccgttgctggcgtggatcgcccagagcccgattatcatcattaccggcgagcagttgagcagctatgaatatggcttgctgcaagtgcctattttcggggcgttaattgcgggtaacttgctgttagcgcgtctgaccagccgccgcaccgtacgtagcctgattattatgggcggctggccgattatgattggtctattggtcgctgctgcggcaacggttatcagtagccacgcgtatttatggatgactgccgggttaagtatttatgctttcggtattggtctggcgaatgcgggactggtgcgattaaccctgtttgccagcgatatgagtaaaggtacggtttctgccgcgatgggaatgctgcaaatgctgatctttaccgttggtattgaaatcagcaaacatgcctggctgaacgggggcaacggactgtttaatctcttcaaccttgtcaacggaattttgtggctgagcctgatggttatctttttaaaagataaacagatgggaaattctcacgaagggtaaaaaaatgcctgactgctttgtgcgatcaggcattctcgaattaatggtgatggtcgtcaatctggtgttcgataaccatcccttcacctacgctggcaagatggcgaacataaggatgcgggcggtaagccggagctggcgcaggagccacatagacggtttgcggcacagtcgcgacgctgaccgcttgtggaacgctgacactatcaggaaccacaaccactttgtatccactcggcacatcgacggtgacactttgcgccatcgccacaccagtaaagcccattaaaagcgcgcccaacagtagacaatttttcataatcatttcgcctgaaataatgcagcgggttaatttccgcgaattatgcagccttcattcaggcattgtgttgccgggcgtgctgccggttttattggtcaaatggcgcttcgtgtttaagaactttatcgatcacatccagtacgccttcacggttattggagcctgcgcggtattttgccgctgcgacgaccgcgctaccggcattttccattgcaaaactaaagcctgcctgacgcagcatctcaatatcgttaccgccatcgccaaagaccaccacttcgctgtcgtctattccccataatttctgcagttggcgaaggccattggctttatgtacgccggggataatcagatcgatgctgccgttgccggtgtggacgctcaccataatatcgccgatggcctcatgtaatgctttttgtacttgtggaatcagttcatcggaaagattcaggccaaacttaaagaagatatcctctaagttgtcaaagttatcgacgtattccagacggtgataatacatttccgccaccgttttcatggcatcgtcatattttttgagtgtataggcactattttttccgcaggcaataatttccacttccgggcgcgtcagcaaatgttccacgacagtagcaaacgcatccttgcttagctcgccattaaaaacatctttgccttcgctcactacccagccgccgttttcagccacaaaggcaatttcattagcaatttcagggaagaaagagatcaactgataatattgattcccgctggcgactacaaagcgaattccttgcgctttcatttgctgatactgagccataaaccgctcacggttataggttttttgatcgcttaagaaagtaccatccatgtctaccgcaattaatttaatgctcatcaactattctccatcgccgtctgcgttttggtatcgggtttggcgacggctttcgcgacaatagccgcgagaataaccagcgccagtacaaccagcattgcactacgtaatccataatgttcgccgagatagcccagcagcggcggcccgacgaggaaagccagataaccggtcgttgctaccacactgacgcgggttggtgcatcggggccggtatcgctggcggcagaaatggtcagcgggaagcccaggctggcacccagtccccagagtacaacagacaccccagcgacccaggcgctatcgacaaaaataatcagcccaatacccaacgcccccattagtgcactggcccgaaccacggcaacgcgactgtaacggtcgatgaaccaaccgccggtgaagcgtccaacggtcatccccagggtaaaaccggcataaatcaggctgccggaagtagggctaaaaccgtgaccgtcaaccattaataagggtaaccagtcgttggcagaaccttcggcaaaggccatcgccagcaccacaacacctatcagcagcaactggatatcgcgataaaaaggtacgcctttttcgccatgctgggtgccatcggcagcatttttgcccgtaccgtcagggattgcctgaatggcgatataaataggtgcgatacctaccagcgccgccaataaaatgtgcaccgttgccggaacgccaaaggccgtcagtgccatcccgacacctgcgcctgccagcgtgcccaggctataaaaaccgtgcatcatcggcaaaaccgtcttattcatttctcgctcaacggcagcaccttcaacgtttatcgccacttccgcagaaccaaaacttgccccaaagacgccgagaccaacggcaaagagcagggggcttgtcagccagagtgccagacttaatatcatcatcccgatcaatgcgcaggacatcgtgaccaggatgacattacgtgtcccaaagcgtttcactaaccacgcgctgcagagaataccgctcatgctaccgatgctcagaccaaagagaacaccgcccatttcagcgatgctgacagagagaatatcgcggatagcaggcgtacgggttgcccaggacgccattaacaggcctggcaaaaagaagaacataaacagcgcccaggttcggcgtttcaatgcattacgactagaatttacggtcatagatcacgtcaaaataagaagagggaagacaacattagcaaggttgtgtacatttgtacacaattgcagagagaggaaatgacatgcgtcgcgctaacgatccgcaacggcgagaaaaaattatccaggccacgctggaggcggtgaaactttacggaatacatgctgttacgcaccgcaaaattgctacccttgccggggtaccgttgggaagcatgacctactattttagtggaattgatgagttgttactggaggcgttcagcagttttactgagatcatgtcccggcaatatcaggcattttttagcgatgttagtgatgctccgggcgcatgccaggctatcaccgatatgatctacagcagtcaggttgcaacgccggataacatggagctgatgtaccagctctacgcgctggctagccgaaaaccgctattaaaaacggtaatgcaaaactggatgcagcgcagtcagcaaacgctcgaacaatggtttgaacccggaaccgcccgcgcgcttgatgcgtttattgaggggatgacgctgcattttgtcaccgaccgtaagccgctaagccgcgaggagattttgaggatggttgagagggttgcagggtaatagataagttttagataacaaaaaacccatcaaccttgaaccgaaatggcggggttgatgggctccacaaaatggggacatcaaagaaaagcagtggcactaattaagactgatgccctgcggaaaagttctgcggttgtgcaaaaaaatttcattttcagggcaacttcagttttatcctaatcctggccataccatgacgatgattgtccctgccagcgtcagcaggacgttggcgattgcataggtgcccgcatagcccagcgccgggatgttactgcgagctgtatcactgatgatctccattgccggcgcgcaggtacgtgcgcccatcattgcgccgaacaacagcgcgcggttcattcgcaatacataagcaccgaacaagaaacagataaccacgggcaccagactgacaatcaatccggcaatcaacatctgaccgccaatcgcgcccaggccgttattaataccgctaccggcgctcagaccaacgcctgccataaacaccatcaagccgaactctttcaccatgcttaatgcaccctgcggaatgtaaccgaaggtcgggtggttagcacgcataaagcccagcataattccggcgaataacaacccggcagcgttccccatgccgaaactgaatgtgctgaactggaaggtgatcatcccgatcatcagcccaataacaaagaaggcgcagaatgccagcaggtcagtgacctggctgtgaatgctgataaagccgatgcgatcggcgatggtttttacgcggcgggcatcgccgctgacttgtaaaacgtcacctttgttaagcacgacgttgtcatctatcggcatctcaatctggctacgaatgacgcggttaaggaagcaaccgtgatcggtcaacttcagttgtgcgagacgtttacctacagcgttatggtttttaacgaccacttcttcagtgacgatacgcatgtcgagaaggtcacgatcgaaaacttctttaccgttacggaagctgggatcgagtcgggcatgggcgtcgggatagcctaccaacgctatttcatcgcccatttgtagcacggcatcaccgtctggatttgccagaatcccgttacgtcgaatacgttcaatgtagcagccggtttgtcgataaatacccagttcacgcagatttttgccgtcggtccaggccaccagttccgggccgacgcgataggcgcggatcaccggtaaataaaccttacggttggcatcagtgtccaggccacgttcgcgggcgatttgctgggcgctggtctgtaagtcctgatgctgcaatttcggcaagtaacgcgcaccaacaatcaaactcaccagaccgattaaataggttaaggcatacccgaggctcagattatccagtgccagactgagctgcctgctttccatgccggaatgacgcagtgtatcgccagcaccgaccagaaccggtgtgctcgtcatagagcctgctaacataccggccgtcaggccaatatcccagccaaacagcttacctaaccctaaggcgatcaccagcgcactgccaaccatcaccagtgctaacattaggtaatttttcccatcgcgaaaaaaaatggaaaaaaagttcggtccggcttcgaccccgacgcagaaaataaacagcataaagccaagattaagcgcatcggtgttaatgctgaaatgttgttggcctaataacaggcttacgactaaaacgccaatggaattacccagttggatgctaccaagtcgtaactttccgagacatagcccaagcgcgaggaccacaaataataacagaatgtaattcccatttaacaattcggcgacgtttatattcacggaggctaacttcttgtttactagtaagctgttgaaagaaatggtaatttacgataatgttttttaccagaattcagggcgcagattcattcagcgcacctaaacgatagtaaagtaacaatatattttactagtgtaatcacattaggtatcaacggctatatgaattgcgttggcctatattagcatggaatgcgaagcggctttatcttactgaacgccacactggcgaaaaatgtgttcgatagacgcagtgtcaggaggaacgagtgaaacataaacaacgttgggcgggggcaatctgctgttttgtcctcttcattgtggtgtgcctttttctggcgacgcacatgaaaggcgcttttcgggctgccgggcatcctgaaatcggcttgctatttttcattcttcctggagcagtcgccagcttctttagtcagcgtagagaagtcctgaaacctctgtttggcgcaatgctggcggcaccctgtagcatgctcattatgcggctgttttttagtccgacgcgcagtttctggcaagagctggcatggttactaagcgcggtgttctggtgtgcgctgggggcactgtgtttcttatttatcagtagtttgtttaaaccacagcacagaaaaaatcagtaaagccctcaacgcgagggcttgtcagacgatcaggcgtccagattttctttcacccatgcagcaaaatcggtatagccgccgatatgttgctgatcgacaaaaatctgcggcacggtttctacgggtttacctgccttttgttgtagatcttctttagtgatcccttccgcacgaatatctacatactgatactgaaaatcatcgcgttcattgctcaatttctcagccagatcttttgcacgcacacagtaagggcaaccgctacgaccaaaaataacggtttgcattatttctctcctcatagatttatgcctgtaatgatcacgctaaaatgtattcgctgaaagtaggtttaacctgttgcattaattgctaaaagctataactgttaaacacaatacagtgaaaagttttagactgaaggctcactttgcagagggaagcgtatgcgcgcgatcggtaaattgcctaaaggcgtgttgatactggaatttatcggaatgatgctactggcggtggcgctgctgagcgtaagcgactccctgagcctgcctgagccattttctcggccagaagtgcagattctgatgatttttctcggtgttttgctcatgcttcccgctgcggtggtggttattcttcaggtggcaaaacgtcttgccccacagctgatgaaccgtccaccgcaatatagtcgtagtgaaagagaaaaagataatgacgccaaccattgaacttatttgtggccatcgctccattcgccatttcactgatgaacccatttccgaagcgcagcgtgaggcgattattaacagcgcccgtgcgacgtccagttccagttttttgcagtgcagtagcattattcgcattaccgacaaagcgttacgtgaagaactggtgacgctgaccggcgggcaaaaacacgtagcgcaagcggcggagttctgggtgttctgtgccgactttaaccgccatttacagatctgtccggatgctcagctcggcctggcggaacaactgttgctcggtgtcgttgatacggcaatgatggcgcagaatgcattaatcgcagcggaaagcctgggattgggcggggtatatatcggcggcctgcgcaataatattgaagcggtgacgaaactgcttaaattaccgcagcatgttctgccgctgtttgggctgtgccttggctggcctgcggataatccggatcttaagccgcgtttaccggcctccattttggtgcatgaaaacagctatcaaccgctggataaaggcgcactggcgcagtatgacgagcaactggcggaatattacctcacccgtggcagcaataatcgccgggatacctggagcgatcatatccgccgaacaatcattaaagaaagccgcccatttattctggattatttgcacaaacagggttgggcgacgcgctaaaaccgccacgtcgatgtatgatacgcgggcttttgaccaggtctgacagagaggtgcagggtgaaaattgccatattgtcccgggatggaacgctctatagctgtaagcggctgcgtgaagccgctatacagcgcggtcacctggttgaaattcttgatccgctttcttgctacatgaacataaatcctgcggcgtcttctattcactacaaaggccgcaagttaccccattttgacgcagtgatcccgcgtattggcaccgccattaccttttatgggacggcggcactgcgccagttcgagatgctggggagctatccgctcaatgagagcgtcgccattgcccgggcgcgtgacaaattgcgttccatgcaactgctggcgcgtcagggcatcgacctgcctgtcacgggcattgcgcatagcccggatgataccagcgatttaatcgacatggtcggtggtgcgccgctggtggtcaagttggttgaaggcacgcagggaattggcgtcgtgctggcggagacgcgtcaggcggcggaaagcgtgattgacgctttccgcggtctgaacgcgcatattctggtgcaggaatatatcaaagaggcgcaagggtgcgatatccgctgtctggttgttggcgatgaagtggtcgctgcgattgaacggcgggcgaaagagggcgattttcgttccaatttgcatcgtggcggcgcggcaagcgtcgccagtatcacaccacaggagcgtgaaatcgcgataaaagccgcgcgaacgatggcgctggacgttgctggtgtggatattctgcgtgctaatcgcgggccgttggtgatggaggtgaatgcgagcccggggctggaaggaatagaaaaaaccaccggtatcgacatcgcgggtaaaatgatccgctggatcgaacgccacgctacgacagaatattgcctgaaaacgggtggttaatcgcaatcacattactgatcatggttttgcctgcgctttttgcgtaagctgtgccggtctttttatcgaaagaggttgtacaaaattatgacaagcctggtcgttcctggtctggatacgctgcgtcaatggctcgatgacctggggatgagtttttttgaatgtgataactgtcaggctctgcatctgccccatatgcagaatttcgacggtgtctttgatgccaaaatcgatctgatcgataacacgatcctgttttctgccatggcggaagtccgacctagtgccgtattgccgctggcggcggatttatctgccatcaatgccagtagcctgaccgtgaaagcatttcttgatatgcaggatgataatctgccaaagctggtggtttgccagtctttatccgttatgcagggcgtaacctatgagcagtttgcatggttcgtgcgtcagagcgaagagcagattagcatggtcattcttgaagctaatgcccatcaactgctgttaccgactgatgatgaagggcaaaacaacgttaccgaaaactatttcctccactgataactcctttcgagcacgcagtcgctggtgcagtggctgcgcgctgcaaaattatctgctgtttttaaccttttcttaaagattatttcacttctcttgtgtcgatttggctttatcacatagagcaaatatgcataaaaatttgttaaataccgttttttaatccgagctatagtctcaaaccctggctaaagttattcttgcgatgcttttatatagcgagcagtgctggccgggagaaagttctcttttcttacaccgcgccgataaaaaatatgcacgtttattgcatatctttcagtgtgacaacttttgttcgtttgttaacgaactttcagaaggaaagagatatgaccgccttaaataaaaaatggctaagcggtctggttgcgggtgctctgatggccgtctctgtcggcacgctcgcggctgaacaaaaaacactccacatttataactggtctgattatatcgccccggacacggtggccaattttgaaaaagaaaccggtattaaagtcgtctacgatgttttcgactctaacgaagtactggaaggcaaattaatggccgggagtaccggctttgatctggtggttccatctgccagctttctggagcgccagttgactgcgggagttttccagccgctggacaaaagcaaattgccggagtggaagaatctcgacccggaactgctgaagctggtcgccaaacacgatcccgacaataaatttgctatgccctatatgtgggcgacgaccgggattggctataacgttgataaagttaaagcggtgctgggcgaaaacgcgcccgtcgatagctgggacttgatcctcaaacctgaaaatctggaaaaactgaaaagctgcggtgtctctttcctggatgcgccagaagaagtttttgctaccgtgttgaattatctcggcaaagatcccaacagcactaaagcggatgattacaccggaccggcaacagatctgctgttaaagctgcgcccgaacattcgttatttccatagttctcaatacattaacgacctggcaaacggcgatatttgcgtcgctatcggctgggcaggtgatgtctggcaggcgagtaaccgcgcgaaggaagcgaagaatggcgtgaatgtcagcttcagcattccaaaagaaggggcgatggcgttctttgatgtattcgccatgcctgcggatgccaaaaacaaagacgaagcctatcagttcctgaattacctgctgcgcccggatgtagtagcgcatatttccgaccatgtgttctatgccaacgccaataaagcagccacgccgctggtgagtgcggaagtccgtgagaacccaggtatttatccgcctgcggatgttcgtgcgaagctgttcactctgaaagtgcaggatccgaaaatcgaccgtgtgcgcacccgcgcgtggaccaaagtgaagagcggaaaataatccgcagtcgtagatgccggaggggcgcaccacacccgccggcaattcgcaccattatggtgcgcttgcacacattcaatgccggagagcagccgtgaatgacgctatccctcgcccgcaggcgaaaacccgtaaggcgctgacgccgctattagaaatccgcaacctgaccaaatcctacgatggtcaacatgcggtggatgatgtcagcctgaccatctacaaaggtgaaatcttcgcgctgctgggcgcatccggctgtggcaagtccacgctgctgcgtatgctggcaggtttcgaacaaccttctgccggacagataatgcttgatggcgtcgatttgagtcaggttccgccttacctgcgccccatcaatatgatgtttcagtcttacgcgctgtttccgcatatgaccgtggaacagaacatcgcttttggcctgaaacaggacaaactaccgaaagcggaaattgccagccgggtcaatgagatgctcggcctggtgcatatgcaggagttcgccaaacgcaaaccgcatcagctttccggtggtcagcgacaacgtgtggccctggcccgaagccttgcgaagcgcccgaaactattactgctcgatgagccgatgggcgcgctggataaaaagctgcgtgacaggatgcagcttgaagtggtggatattctggagcgcgtcggtgtgacttgtgtgatggtcacccacgatcaggaagaggcgatgaccatggcggggcgcatcgccattatgaatcgtgggaaatttgtccagattggcgaaccggaagagatctacgagcatccgactacccgctatagcgccgaatttattggcagcgtaaacgtctttgaaggcgtactcaaagagcgtcaggaagatggcctggtgcttgatagcccggggctggtgcatccactgaaagtcgacgcggatgccagcgtggtcgataacgtgccggtacatgtggcgctgcgcccggaaaaaatcatgctttgcgaagagccgcccgccaatggttgtaacttcgcggtgggggaggtgatacacattgcctatctcggcgatcttagcgtgcatcacgttcgtctgaaaagtgggcagatgattagcgcccagctacaaaacgcccatcgtcatcgtaaagggttaccgacctggggcgacgaagtgcgtttgtgctgggaagtggacagctgtgtggtgctgacggtttaaggagcaaagatgagtacacttgaacctgctgcccagagcaaaccgccgggcggatttaagctgtggttgagccagctgcaaatgaagcatgggcgcaaactggtcattgcgttgccatatatctggttgatcttgctgtttctgctgccatttctgattgtctttaaaataagcctggcggagatggcgcgcgctattccaccttataccgaactgatggagtgggctgacgggcaactgtccatcactcttaatctcggtaattttctgcaactgaccgacgatccgctctatttcgatgcttatctccagagcctacaggtggctgcgattagcacattttgctgtttactgatcggctatccgctggcgtgggcggtggcgcacagtaagcctagcacccgtaatattttattactactggtgatcctgccgagctggaccagctttctgatccgcgtttatgcctggatgggaatattaaaaaacaacggtgtgctgaataattttctgctgtggctgggggttatcgatcaaccgctgaccattctgcataccaatctggccgtttatatcggcattgtttacgcttacgtgccgtttatggtactgccgatttataccgcgttgattcgtattgattatagcctggtggaagcagcgctggatctcggtgcacgaccgctgaaaacgttctttactgtgatcgtgccgctgactaaaggtgggattattgccggaagcatgctggtgtttatcccggctgtgggcgagtttgtgatcccggaactgctcggtggcccggacagcatcatgatcgggcgcgtgctatggcaagagtttttcaataaccgcgactggccggtggccagcgcggtagcgatcatcatgttgctgctgctaattgtgccgataatgtggttccacaaacaccagcaaaaaagcgtgggagaacacggatgaataatttaccggtagttcgtagcccctggcggattgtgattttgctgctgggctttacctttctctacgcgccaatgctgatgctggttatctatagctttaacagcagcaagctggtgacggtgtgggccggctggagtacgcgctggtatggtgagttattgcgcgatgacgcgatgatgagtgcggttggtttaagtctgacaattgcggcctgtgcggcgacggcggcggcgatcctcggaactattgcggcggtggtgctggtgcgctttggcaggtttcgcggaagtaatggctttgcctttatgatcaccgcgccgctggtaatgccagatgtcatcacgggcttgagcctgttgttattattcgtcgcgcttgctcatgccattggctggcctgcggaccgcggtatgctcaccatctggctggcgcatgtcactttttgtacggcttatgtggcggtcgttatttctagtagattgcgggaactggatcgcagcatagaagaagcagcgatggatctcggtgcgacgccgctgaaagtgtttttcgtcattacgctaccgatgatcatgcccgcgatcatttctggctggttactggcttttactttgagccttgatgatctggtgatcgccagctttgtttccgggccgggagccaccacgttaccgatgctggtcttttccagcgtgcggatgggggtgaatccggaaatcaacgccctggcaacattgatcctcggcgcggtcggaattgtcggatttatcgcctggtatctgatggctcgcgcagaaaaacagcggatacgcgacatccagcgtgcaagacgtggctgaagacactaaaatttgccaacctggctacataatgccgcgcatgtcgcggcattgttttcatggaagacgaaacgttgggattttttaagaaaacatctagttctcatgctcgcctgaatgtgcctgcgctggtgcaggtggcggcgctcgccattattatgatccgtggcctcgacgtgctgatgattttcaatacgctgggcgtgcgcggtattggcgagttcattcatcgcagcgtacaaacctggagtttaacgctggtctttttaagcagtctggtgctggttttcattgagatctggtgtgcgtttagtctggtgaaagggcgtcgctgggcgcgctggctatatctgctgacacaaatcaccgccgcaagttacttgtgggcggctagcctggggtacggttatccggagctgttcagcattcccggtgaaagtaaacgtgaaatcttccatagcctgatgctgcagaagctgccggatatgctcatcctgatgctgctgttcgttcccagcaccagtcggcggttcttccagttgcaataatgtgtataatcgtcgcccctgatgatgtgaaggtcaatgtatgcagtgcgcactttacgacgcgggtcgctgtcgttcctgtcagtggataatgcagccgattccagagcaactctccgctaaaaccgccgatcttaaaaatctgctcgccgactttccggttgaggaatggtgcgcgccggtgagtggcccggaacaagggtttcgtaataaagccaaaatggtggtgagtggtagcgttgaaaaaccactgctcggtatgctgcatcgcgatggcacaccagaagacctttgtgactgcccgctttatcctgccagttttgcgcccgtttttgcggcgctaaaaccgtttatcgcccgagcggggttaacgccctacaacgtggcgcgtaagcgtggcgaactgaaatacattctgctgactgaaagccagagtgatggaggcatgatgctgcgctttgtactgcgttctgataccaagctggcgcaactgcgtaaggcgctgccgtggttacacgaacaactaccgcagctgaaagttattaccgtcaatattcagccggtacatatggcgattatggaaggggagacggagatctacctgaccgaacaacaggcactggcggagcgttttaatgacgtaccgctgtggatccgtccgcaaagtttcttccagactaatccggcggtcgccagccagttgtacgccaccgcgcgcgactgggtacgacagctgccggttaaacatatgtgggatctgttctgcggtgtggggggctttggtttacactgcgcgacgcctgacatgcagttaaccgggatcgaaattgcaagtgaggccattgcctgtgcaaagcagagtgccgctgaactgggcttaacgcgtttgcaatttcaggcgctggactccactcagtttgccaccgctcagggggatgtgccggagctggtgctggttaacccgccgcgccgcggcattggtaaaccgctgtgtgattatctcagtacgatggcaccgcgttttatcatctactccagctgtaacgcccaaactatggcgaaagatatccgcgaactgcctgggtttcgtattgaacgggtgcagcttttcgatatgttcccgcataccgcgcactatgaagtgctgacgctgctggtgaagcaataaaaaagccgcatgtgcggcttcagattgctgacaaagtgcgcgttgtttatgccggatgcggcgtaaacgccttatccggcctacaaaagcgtgcaaattcaatacattgcatgggccatgtaggcctgataagcgtagcgcatcaggcaattttacctttgtcatcagtctcaagccgcggttgcggctttctgaatcttactgtgggaaccactggtcactgattttttgataagtaccgtcagctttaattgctgccagcgcgttattcagtttttccagcagggctttgttatccggacgtacagcgatgcccaggccggtgccaaaatattgcggatcggtcactttctcagtagcaacaccaagttgtggattggttttcagccattcgtttaccaccgctgtgtcaccaaataccccatcaatacgaccatttttcagatcgataaaggcattctgataactgtcataagagacagttttcacttccgggtgctgatcctgaatatatttctggtgcgtagtaccgttttccatcccaatacgtttgcctttcagatcggcaaacgttttgtaggtatcttttttggcaatcacgacggcactgttttcatagtagggcgtggtaaagcttacctgtttgctacgctccggggtgatatccataccggagattacggcgtcatattttctgaatttcagggacgggatcaggctgtcgaacgcgtgattagtaaaagtacattctgcctgcatttgtttgcacaaggcttttgccagatcgatatcaaagccgacaatctcattattagcacctatagattcaaagggtggataggtggcactaacgccaaaattgattttctctgcggcagaagcaccgaaagtaaaggaagcaagtaaagcggcaagaactaactttttcatgatggaactcccgtctgtcaatcttatgatttttggccgtgtctgcggcatgggataacaatgccatcaagtgaatttatatgcaataaacatgattaaataatttaaatgaaataaaaaagacggacaacttagtgggttgtccgtcttcattataagaatttatgcactatgtaggccggataaggcgtccccgccgcatccggcacaggcaccgtgctgatgtctgatgcgacgctggcgcgtcttatcagacctacaaaaccccccggcgaatgtacgcagccacattaatttcgccgttcgaatgccagcgctttgcgctcgatcagacgcatcatcagcgtcagcaggccgttaacgaccaggtaaataatccctgccgcaccgaacaccattacatcgtaggtgcgtccgtacaacaactggctgtatcccatcacttccatcagcgtaatggtgtatgccagagaggtacttttgaataccagcaccacttcgttggaataagaagagaggctgcgtttaaaggcatacggcagcaggatcgccagcgtatcttttttgctcattcccagggcgctacaggactgccactgaccttccgggatcgcacgaattgcaccgtaaaacagctgcgtggtatacgccgcactattcaggctcaacgcaatcagcgcacataaccacggttcactcaacaaatgccacagtgccggatactcctgcaaagtcggaaactggcccggcccgtaataaatcaggaagatctgcaccagcagcggcgtaccggtaaacagcgtgatataaccccgcaccagccacaccagcaccggcgttttcagcgtcaggatgatggtaaaaatcaatgccagaatcagtgccacaatcaggctggcaacggttagcgtcaggctggtgtgtagccctttcatcagttcgggtaaatactcaaacattagctgggcctccgctcaaaacgtgtcgcgcgcaggtcaatgcgtttgagaatgtactgactgagcagggtgatcaccaggtaaatcgccgccgccacaatgtaccaggtaaatggttcctgggtacgagtagcgatgctttttgtttgcagcattaaatcattcacactaatcaaactgaccagcgcggtatctttcagcagcaccagccactggttaccgaggccaggcagcgcatgacgccacatctgcggcatcaccagacggaaaaagatagcgcttttgctcagccccagcgcctgaccagactcccactgacccaccggcaccgctttcaacgcgccccgaagcgtttggctggcataggcggcatacagcagactcagagcgatgacaccacaaaggaacgggctaacgtcgaagttctcaatgtccatctgcactgggatctgcacgaacccaagattgatagtgaagccatcgctaagcgtcagcagcagctggctggagccaaaatagataaacagcaccaccagaatttctggcaggccacgcagaatggttaccagcgcactacctgcccacgcgacaggacgccattttgcgctctcccataccgcaaagaacatcgccagcgccagcccgacaatcaatgcacaaacggcaaggccgacggtcatcccggcggcgcttgctaaaggaaaaaattcattcatcaggaattacttctggaaccatttgttgtagatggtttcgtaagtgccatctttcttcactttttccagcgcagtgttgagtttctgctgcagctcagtgttgccctgacgtaccgcgatgccgaggccagtgccgaagtaatctttatcggtcactttgtcgcccaccgccgccagtttcgggttatctttcagccactcagtgaccactgcggtgtcaccgaagacgccgtcgatacgcccgttttgcagatccagttttgcgttctggtagctgtcatacggaacggtagtgatttccgggtgcttatccataatgaatttctggtgtgtcgtcccgttctgtacgccgacttttttgcctttcagctgatcaacactggtgtatttgccttgctgacccacaaacagggcagagttgtcatagtacggggtggtaaacagcacctgcttttcacgctccggagtgatatccatgcccgccatcacggcttctacgcgacggaatttcaggcttgggatcaggctgtcaaacgcctggttagagaaagtgcaggttgcatcaatctctttacacagcgcttgtgccaggtcgacgtcaaaaccaacgatctggttgtttgcatcaatgctttcaaacggaggataggaggcttcggtagcaaaacgaatggtttcggcagctgtggcggaaagactaaaacctgcaattaacgcggcaatcagaacttttttcattgttgttatcccgaatcttagtgagagagatagtttttaaatgcttcggtttgcggctcggtaaagcagctcgcgtcgccttgttctacgatatgaccattttccatatacaccactcggctggcggttttacgcgccacttcaacttcgtgggtgacgatcacctgggtaatattcgtttctgccagctcacgaatgatgctgacgatttgtgccgtaatttccgggtccagtgcggcggtcggttcatcgaacagcagtacctgcggttccatcatcaacgcacgggcaatagcaacacgctgctgctgaccaccagaaagatgcagcgggtaacgatcgctataaggtttgagacgcagacgttccagcagtttttctgcacgggccagcgcctgatctttactcaaccccagtacacggcagggcgcttcaatcaggttttgctgcacggtcagatgcggccacaggttgtattgctgaaacaccatgccaacgttacgacgcaaatcgcgaatcgctttgtcagagggtgttttggtgaaatcgaaatggttgcctgcaatgttgagcgtaccggagcgcggcatctcaagcagattgagtacacgcagcaggctgcttttacccgcgccgctggggccaagtaacaccagcgtttcgccctgtgggcaatccagcgtgatatcgaacagcgcctgatgcgcgccgtagaagcaattaatgccgtttaattgaatactcattgacactcgtatactggcagtctgatagctattgaggtcgaagatagtacctttgacagaataattatgcaatatttctgctttaaaagttaaaagcaaagcgcattattcaataaacatagcacaaaataacgggggcggtggtcggcgagcataaatgtcggcattcctcacgaaatgccggacaatttacggggtttattggttgatcaaggcgttagcgattctcgatggactgacggagcgtacccgccgtggcatgaacgctaccgcctaagtaacgcacatcgtcgatgacccaacactggccttcctgaatcattaacacttcatcctgccaaccctggtcaccctgtttgagatccacgcgcaatggaatgttacgggcatcacgattagggatagtgcttgcactggcaacgtgggcgctatctggcaaggtggttcgactggagaatggatcgttggtcagtagttcccgatggttattatcccgggaggcatcgctaagcagtgtcgccagtttgtcgctcagataagggcgcaaggcggtgatgtcgttgctgcggtgcaaaatgcggtagtcataaaattgctgggccacgttatccgggcctccttcaacgcaaggaccactgcgtgtgccgttatctttataagctggagtgactgtggtgcaggcactgaggagcagtgcgcaggggataagcattgtcaatttgctgtagcgcataatgatttccttataagcgatcgctctgaaagcgttctacgataataatgatatcctttcaataatagcgtatcagtctgataatgcttttgagatcgaaggcttagcaaacaaggagatcgatcatgcaattttctacaaccccaactctggaaggccagaccatcgttgaatattgcggtgtggtgaccggcgaagcgattttaggtgccaatattttccgtgatttctttgccggtatccgcgatatcgttggcggacgttccggtgcgtatgaaaaagaactgcgtaaagcacgggagatcgcctttgaggaattaggctcccaggcgcgggcgctgggggccgatgccgtcgtcggtattgatatcgactacgaaacggtcgggcaaaacggcagtatgctgatggttagcgtcagcggtacggcggtgaaaacgcgtcgatgagaagattcttctggctggtcgctgccgctctgttattggcagggtgtgcaggcgaaaaaggcattgtcgagaaagagggatatcagcttgatacccgacgccaggcgcaggcggcgtatccgcgcattaaagtgctggtgatccactacaccgcagatgattttgatagcagcctggcgacactgaccgataagcaggtcagcagccattatctggtccctgcggtaccaccgcgatacaacggtaaaccgcgcatctggcaactggtgccggaacaagaactggcctggcatgcggggattagcgcctggcgcggggcaacgcgccttaacgacacctctattggcattgagctggaaaaccgtggctggcaaaaaagcgccggagtgaaatattttgccccgtttgaaccggcacagattcaggcgcttattccactggcgaaagatattattgcccgttatcacatcaagccggaaaacgtagtggcacatgcggatatcgcaccgcagcgcaaagacgatccggggccattatttccctggcagcaactggcgcagcaggggattggtgcctggccggatgcgcagcgggttaacttttaccttgccgggcgcgcgccgcacacaccggtagataccgcgagtttgctggagcttttggcgcgctacggttatgacgttaaacctgatatgacaccgcgcgagcagcggcgcgtgattatggcattccagatgcatttccgcccgacgttatataacggcgaagcggatgcagaaactcaggcgattgccgaagcattgctggagaaatacgggcaggattaacgcggcagttttccgtggtcgcgtagccaggcggcagttttctcgataccttcatccagggtgatgaccggctgataacctaactcttcctgcgcacgcgtaatatccagcgtaaagtcaaaattcaacttggagacgccgtagtgggtcagcggcggctcttttgcactcttgcggcctaaacgctccatgctgcgggcgatcatatccagcatcgggtaggggacggaacgaatacgacagtcaatattcaactcgtcgatcagcttctgcacgatgctgcgcagtgtgcgatgctcgccgttggtgatgttgtacacacgcccggaaggtagcttatcgcaggcttcctggcttgccagccacattgcgtgcacggcattttcatagtaggtcatatcgaccagcgcactgccgccatgcggtaacagaatactgccgtagtggtgcatcatatgcgccagacggggaataaagactttatcgtgcggtccgaacagactttgtgggcgcagaatagtaaagcgcgtttgtggattcgcctggctaagcatattgatcacttcttcgctggctgctttgctgcgggcaaactcgttggcgaagcggtgagggcgaaaatcttctttaatatcgcgatggtggtgataatcgaagtacagggagggggaagagatatgaataaagttacgcacaccccaggcgacagcccattcacccaggcggcgagtggcgcgaacgttagccagatcgaaagcctgttgtgtcccccagggactggtaaagctggagcagtgccacagcgtatcaatgcccgcgagcatcactttagcttgactactaaccagctcggtcagatccgccggaacaaactctgcgcccattttttccagcaatttgcccattgcctcgttgcgaccggtcgctcgcacgctgatgcctttctggcataaaaactctaccgcgtttcgacctaagccgctggtggcgccggtaaccagtaccttcatatcaatccactgttgttgagaaaataacgtgcgcattcttccgtgatttcccccatgatgcaatgggaaacatgaaagaataacgcaggttttgtcgattaatctgtgctttgttctgccagtctggcgatttgttttgccattccgcgaaaaataaacagatgcgcggggatcatcaataaccagtaaaacagccccggcataccgtgcggatgccagaaagcgcggacatcgatagtacgatagtcgcctttatcttccaggctaaaacacagtcgtcccagccccggcgctttcatgccaaataacaacgtaagttgtttttccggttcaacgacaatcactttccagctatccaccgcatcgccagtctgtaaatattcgcgctccgggcggcctttcgccagcttatgaccgatcgcgcggtccatcaacgcccgtgtctgccacaaaatattgccaaagaaataacgctctttaccgccgatttggttcactacctgccataaagcagcaaggctggcggacgttttaacggtaaaccccgcctgtttggcaaaataaccgtactccggtcgccagcgggcaaaggcctgagcgtcgtagccccagtcgctggagttgaccagtttttcctcctctttcaacgtgctacgtaccgcgtcatcgaaagcgatcagccgttgtgggatgagtgcacgtagcgcggtatcatccgccagcagatcgtgtttcagcccctgaatcaacgccctggcggtggtgggcggtacggaagtaatcacattgagaaaccacacgctaatccagcgggtggggagggggatggggatcaaccagcggcgcttaccgctcaccgccataaaatgttcaaactgttgctgataactgagcacctctggtccggcggcttcgaagatgcggtgttcgctggccggatgatctaacaacgcaaccagatagtgcagcaagttttccagcgcaatgggcgtggtgcgactacgaacccagcgcggaggcgttaagactggcaggttgtagaccatatcgcgcatgacttcgaacgccgcggaacctgcgccaacgataattccggcccgcagttcggtcacgggtacattcgcttcacgcagaatgtccgccgtagcctgacgagcacgcagatgatcgctctgctcatgtggcggggcctgcaagctactaagaaagattaattgcttaactggtacttcacgtagcgcatcgcggacgttgagagccacctggcgctcctgagcgataaaatcgccgccttcgcccatgctgtgcaccagaaaatagaccgtatcgatatcctgcaacagggccggtaggttatccggccagctgagatcgactttatggcaactgacgtttgccagttgcagctttgcaagcctgtcgacatgacgtgccgccgccaggatctgatgcccttgctggctgagtgtgcgcaccagatgctgaccaatgtagccactggcaccgagaactaaaatgcgttgcggcacgtctctctccttaacgcgccaggaatgcacgccagtgggcggcgacttccgccagttgttcgcggctgacgtcaagatgcgtcaccaggcggacaatcgggctggcgttaatcagcacgtttctcgctttcatgtattcgcctaacgcggcagcattttcttccccgacgcgaacaaacagcatattggtgtcctgacgcatcacatccgcgcctgcttcacgcagctgctccgccatccaggcagcgttgtcgtggtcttcctgcaagcgcgcaacgttatttttcagggcatatatcccggcggcagccagaatgccggactggcgcatcccgccacctgtcattttccgccagcgaatggcacgtttaatgtaatcacgattaccgacgagtaaactaccgactggcgtcccaagacctttgctcaggcaaatggtgaagctatcacaatattgcgtgatctctttcagttcgcagccgtaagccaccacggcattaaagatgcgcgcaccgtcaacatgcagcgccagattgcgctcgcgggtaaattcccatgcttctttcaggtattcccgcggcaacactttgccgttgtgggtgttttccagactgagtaatttggtgcgggcgaaatggatatcgtcgggtttgattttcatcgccactttatccagcggtagcgtgccgtcggcagccgcgtctatgggttgcggttgaatactgcccagcaccgccgcgccaccggcttcaaacagatagttatgcgcggcctgaccgacaatatactcttcgccgcgttcgcagtgactgagcagagcgaccaggttggcctgagtgccggtaggcagaaaaatggcggcttctttaccggaaagctctgctgcgtagtcctgcagagcattaacggtagggtcgtctccgtaaacgtcgtccccaaccggggcggccatcatcgcttcgagcatggcgcggcttggtcgggtaacggtatcactgcgtaaatcaatcatggcatgtccttattatgacgggaaatgccaccctttttaccttagccagtttgttttcgccagttcgatcacttcatcaccgcgtccgctgatgattgcgcgcagcatatacaggctgaaacctttggcctgttcgagtttgatctgcggtggaatggctaactcttctttggcgaccaccacatccaccaacaccggaccgtcgatggagaaggcgcgttgcagggcttcatcaacttcagacgctttttctacacggatacccgtaatgccgcacgcttcggcaatgcgggcaaagtttgtgtcgtgtagttcggtgccgtcagtcaaatagccaccagctttcatctccatcgccacaaagcccagcacgctgttgttaaagacgacaattttcactggcagtttcatctgcactacactgaggaaatcgcccatcaacatgctaaaaccgccatcgccgcacatggcgaccacctgacgttctggctctgtcgcctgcgcacccagcgcctgcggcatggcgttagccatgctaccgtggttaaagctacctaacaggcgacgcttgccgttcatttttagataacgtgccgcccacaccgttggcgtaccaacgtcacaggtgaaaatagcgtcatcggcggcaaaatgactaatttgctgcgccagatattgcgggtgaatggctttctcgctcggtttagctaaatcgtccagccctttgcgggcgtcgcggtaatcttccagcgctttatccagaaacttgcgatcggctttttcttccaccaatggaagcaatgcacgcagagtgctcttgatatcgccgaccagtgccatatccaccttgctgtgagcgccgatgctggctgggttgatatcaatctgaatgattttggcatcggtcgggtagaaggcgcggtagggaaattgcgtgccgagtagcactaacgtgtcggcgttcatcatggtatggaaaccactgctgaagccgattaacccggtcattccaacatcatacggattatcgtattcgacatgttctttaccgcgcagggcatgaacaataggcgctttaattttcccggcaaactcaactaactctttatgcgcccccgcgcagccgctgccacacatcagggcgatattgctggaataacgcagcagttgcgccagtttgcgtaactcttcttcttccggcgtcacgactggttgtggcgcatgataccagtgcatggttgccccttctggcgcaggttttaacgccacgtcgcctggtaacacgacaacgctaacgccacggttaagcaccgctttgcgcatggcaatcgccagtacttgtgggatctgctccgggctggaaaccagctcgcaatagtgactacattcgcggaatagctcttgtgggtgggtttcctggaaatagccgctgccaatttcgctggagggaatatgagcggcaatcgccagtaccggaacgtgattgcggtggcaatcgaacaggccgttgattaagtgcaggttgccggggccgcagcttccggcgcagaccgccagttctccgctaagttgtgcttcagcgccagcggcaaaggccgccacttcttcgtggcgggtggacatccactcgatggtgcccatgcgattaagactgtcactaagaccgttcagagagtcgcctgtgactccccagatgcgtttcacccctgcgctttcgagtgttttggcgatataagctgcaaccgtttgtttcatggttctccatctcctgaatgtgataacggtaacaagtttagttcatctgacggagggggaagggatgggagagaaaggaggcactaacggttaaatagcccgatgaaaggaatatcatcgggcataaggcgattatgcgagaaccaaatccccctgcggatggcaggagcaggccagtacgtaaccttcagcgatttcggcgtcggtcagcgtcattgtgctgctcaccgtatattcaccggaaaccacttttgtcttacagcagccgcaaacacccgcacggcaggcagcgacaaccggaacgttattgctttccagcgcctccagtagcgtggtgccaaccggggcgtaaaattctcgtgccggttgcagtttggtgaatttcagaccgctggtcgccgcttctgctactggggtgaagaatttctctttaaagaaacgcgtcacgccgagcgctttcacttcctgctctacccaatccatatacggagccgggccgcaggtcatcacggtacgactagctaagtcaggtacacctgccagcagttcgcgagtgagacgaccagcgataaagccttcggtaacgttattttctgccaccagcgttaccggatagttacgccactcatcggcgaaaataacatcctgcggcgtacgcacgttgtagatcacccgcacatcggcctctgtggacggttcttcgcaagccagcgacgcatgctcataatcggcgtgacgccgcagcctgccgccagcaacaggaatttatcttctgctttatcgtcgcaggtaaattcccccatcgcgtcgctaagccagagataatcaccgcgttttacatcgcgcgtcagccactgggagccgacaccgtcatcaatccgccgcacggtcagggtgatatattcactcacgcctggcgtggaggaaatggtgtaagcacgcagcgtttccgcactgtttcgcacgctgaccagtgcatattgcccggcgcgatatgggtagtaatcgtggcaaatcagggaaatcgtccacacatccggcgtttcttgcgtaatgtgatgaacctgcatccgccacgggcattgattcgttggcatcgtcatcgacaaactccttacgcgctcaacagttgcttcatgtcttcttcaacagtggtgatagaacgcaggccgaatttctcgttcagcaccgccagcaggtctggtgtcaggaaaccaggtgcagtcgggccggtgacgatatttttcacgcccagagaaagcagcgtcagcagaatgacgatcgctttctgttcaaaccaggagagcaccaggctcagcggcagatcgttgacaccgcagcccagtttctctgccagagtgacagccagaataatcgcactgtaagcatcgttacattgacctgcatctaccagacgcggcagaccttcgatatcgccaaactcaagtttgttaaagcgatatttaccacaggcgagggtcaggatcaggcagtcatccggcacgctggtggcgaaatcggtgaagtagtggcgctcgccgcgtgcgccgtcacagccaccaagcaggaagatatgacgcagtttttcacggctcaccagatcaatcagcgtatcagcagcgccaagcagcgtctggcgaccaaaacccacggtgataaggtgcggaatttcgctgtacgggaagcctgccatctgttgcgcctgggtgataaccgcagagaaatcatcaccgtccagatgacgcacgccaggccagccaacaatgctgcgggtccagatacgatcgtcataagcgcctacggttgggtcgatgatgcagttgctggtcatcacgatggggccagggaaacgagcgaactccacttgctgattctgccagccgctgccgtagttaccgaccagatgcttgaatttacgcagctccgggtagccatgcgcaggcagcatttcgccgtgggtgtagacattaacgcccgtgccttcggtctgttccagcaggttgtagagatctttgagatcgtgaccggaaatcagaatgcatttacccgccgtcgctttgacgttgacctgggttggcgtcgggtgaccgtatttaccggtttcgcctgcatccagaatgctcatcactttgaagttcatctggccgatttccatactacactcaagaagcgcgttcatatcggcaggccaggtccccagccacgccatgattttatggtactgggcataaatatcgttgtcgtattgaccgagaacatgcgcgtgttccatataggccgccgcacctttcaggccatacaggcacagcagacgcaggccgagaatgttttcgccaatcgccgctttatctttgttaggggtaaattctgctgcctgacgttgcagctcgccgagatcgtcgctcaccagttgcaggtcagccatcgggttatcgacgcgcgcgttggcatctacagccaggcattgcgctttcagcgcctcgcgcagggcaatcgcttcacgagcgtagccgacaatacgcggagaatcgaagttaacgttggtcagggtactgaaaaaggcacgtggcgcgaagctgtcaacatcgtggttgatgatgccgtattcacgcgcttttaccgcccaggcagaaagcccttgcagcgccgcgatgagtaaatcctgaaggtcagaagtttccgccgttttaccacacatcccctgcgcgtaactgcagccgtttcctgccggagtacggatagtttgttcacattgcacacaaaacatgatcacaccttttaaagttatatttaatatacatgtttaaggttaagacgcttaacgcggggataaaagggatttttcatgcaactttaagggagattgatttagcgcaattttggcggcagggatctaccgccagagaggtattacgcagagaaaaaggcgatgaggatcggcactaacaggctaagaataaaaccgtgaacaattgccgccgggaccatatccagcccgccagtacgttgaagaacgggcagggtgaaatccatacttgtggcaccgcataagcccagtgcagtagagcggctgcggcgaatcagcccagggatcaacataatagcaatcagttcacgggccagatcattaaaaaacgccgcgctcccgattaccggaccaaaagattcggtcaataaaataccggaaagagaataccagccgaaaccggaggccattgccagcgcggtattgatggggagatcaagaataaaggcgttaattaaaccaccaattaaactactgacaaccaccaccacggcgacaatcattccccggcgattaaggacaatctgctttaaggtcatgccattattgcgcaactgaataccaacgaggaaaagtagcaaaattaacgtgtattcactggcttcggtcgcgtgttgtaagaaagccagtccacttagaccaatggcaaaaccaatcactactacgccgcacagttttaggctctccagcgccatcgcaatacggctcgggagtttttcttgctgatggtggttgcgccacggcaggcctcgctccagccacatcagggcggcaatattacacagtaaaataacggtaatactgacggcagaataatgcagaatcgccaacaggttactggcgaggttatcgagaaacgccagactgatacccataaaaaagagaataaggtaaaccatccagcttaatagctgattaataacttttaacgcagcttgttggcgaagcggaatgaggtaacccacaatcaggggaaccagaatgattaacagcccagaaaacatgaaaacccagtccttgcaaagatgaagtcgaaatgcgcgatgacacactactgaaagcggaaggacgagtaaagttgcaattaaaaggaaatgttatgcataaggagcagtagagtattcgttttcatttaaagatattcttgcgctttaattacaaactgcaccgatgttggtggcgtcaaaatcgccgaggcgttccctgaaggccggggcagcccacatggatgtgggctgagggcgcgttttacagggatgttacctcgcgcccgacccggtagccgtaagggataagtcgagggcaccgcgcagcggcgattttgttcgccagagcccgggggtgcagggggcggcggcgattggccgccccctgcgcgctccttgcgccagtggcaatatgttgcttagctcatgaaaggagcgcaacaagatgatgaatcaacatataacaacatcttaaaaaaaggcctgacattacgccaggccttctgcgttaattaatcacgcttttccagcagggtccggtaaatcagaccaccgataatgccgccgacaattggcaccacccagaagaaccacagttgttctaatgcccagccgccctggaagatagcaaccgcggtgctgcgcgccgggttaacagaagtgttagtcaccggaatactaattaagtgaatcagggttaaggccagaccaatagcgatcggcgcaaaacctgccggcgcgaatttgtcggttgcgccgtggatcaccaacaggaaacctgcactcaataccagttcaactaccagcgcggaaagcatggaataaccgcctggactatgctcgccataaccgttagaagcaaaaccgctggctgccgcgtcaaaacccgttttaccactggcaattaaatacagcagcgccgctgcaacaataccgccgacaacctgggcaattacgtagccaacgacttcttttgccggaaaacgtccgccagcccataaaccaatagtgaccgccgggttaaaatgaccaccagaaatatgaccaacagcaaaggccatcgtcagaacggtcagaccgaacgccaacgccacgccggcaaaaccaatgcctaattccgggaagcctgcggccagtacagcactaccacagccaccaaaaacaagccagaaagtaccaaaacattcagctgctaattttctgaacatatccaccacaattaaaaattgaccctgtgaaaaatatggtcgttttatagggtcgtcgtaaaaaagtgacgacggaaataatgcgcggctattttaaaaacgaaggcgagtcattcaccagataaataaatccagtaaatttgatttagggcaacagcgggttgccccatatagtcatttgtctgattgacagtgtagtgcacgcaaaagatttaatcctttaggcgtaataaaaaataatttatcatgctaattatttgattttgttgtttttgcagacttatcagcaagagggagtataacgcgattattcgctcatttttcagacatttgccatgcttaaatgtgatgtcatcacgtattagcaaggcctttcccgttatactgccagcgtaaaggataagtcacatatttctggaggggatatgattcttgagcgcgttgaaattgtgggttttcgcggtatcaaccgtttgagcttgatgctggaacaaaacaacgtcctgattggggagaacgcgtggggtaaatccagcttgctggacgccttaactctgctgctaagcccagaaagtgatctctaccattttgagcgcgacgatttctggttcccgccgggagatatcaacgggcgagaacatcatctgcatattattttgaccttccgcgaaagcctgccaggccgacatcgggttcgccgttatcggccgctggaagcgtgctggacgccatgcaccgatggctatcaccgtattttttatcgtctggaaggggagagtgcggaagacggcagcgtgatgacactgcgcagttttctcgataaagacggacatccgattgatgtcgaggatattaacgatcaggcacgccatctggtgcgtttaatgccggtgctgcgcttgcgtgatgcccgttttatgcgccgtattcgtaacggcacggtgccaaatgtccctaatgtggaagtcaccgcgcgccagctcgatttcctcgcccgtgagttatccagtcatccgcaaaatctctctgatgggcagattcgtcagggactttccgcaatggtacagctgcttgagcattatttctctgagcagggggccggacaggcgcgatatcgtttaatgcggcggcgagccagcaatgagcaacgaagctggcgctatctggatatcatcaaccggatgattgaccgacctggtgggcgcagctatcgggttattttgctcggcctatttgctactttgttgcaggcaaaaggcacattgcgactggataaagacgcccgtccattgttgctgatcgaagatccagaaacccgtttacaccccattatgcttagtgttgcctggcatctgttgaatcttctgccattgcagcgcattgccaccaccaacagcggtgagttgcttagcttaacgccggtagagcatgtttgccgactggtacgtgagtccagccgcgttgccgcctggcgtctggggccgagtggcttgagtaccgaagatagccgacgcatatcctttcacattcgttttaaccgtccgagtagcctgtttgcacgctgctggttgctggtggaaggggaaacggaaacctgggttatcaatgaactggcgcgtcagtgcggacatcattttgatgccgaagggatcaaggtcattgagtttgcccagtccgggctaaagccactggttaaatttgcccgccgaatggggattgaatggcatgtactggtcgatggcgatgaagcagggaagaaatatgccgctacggtacgcagcctgttgaataacgatcgggaagccgaacgagaacatttaacggcgttaccggcgctggatatggaacattttatgtatcgccagggattttccgatgtgttccaccgcatggcgcaaatcccggaaaatgtaccgatgaatctacgcaaaattatcagcaaagcgatccatcgctcttccaaacccgatcttgccattgaagtggcaatggaggcaggacgtcgtggtgtggactccgtaccgacgctgctgaaaaaaatgttcagtcgcgtgctgtggctggcgcgcggtcgcgcggattaaccgcgaaacatcgtggccatttgtggctgaatagcgtcgagcatctcatagcgccgacggtattcagcccgttttttactggcgatttcggcaatctcttttcgtgctatctgtgctggaaggcggtaatggcgttcagcatcacatacgccgccaacgctttcccagaaagcgttgtaatcagcgtggatcttgccttctttatcgcgataacgcaggctgcggtaaatatgcgtttcattgctgacggcaataatctgctctacctgcaaacgttgggcaaacagacaggccgctttcatcacgaggcgtttgggaaatagcccgtggcaggctttcgtcgcattctggatttcctgatgtggaatttcccattttgcgccttgcagtccgccaataaacatcgttcttttcccctgatattcacacagggtaaacgtgatctctgccagaggaataccttcgctgttgcggaacaggattgtgctgtcaccttctttatccatactgatcatcatggtcagctcaagcgtgaactgctcgccgtttttgccttccagcttcgccagttgcagcccgggggtattcaaatataagctgaattcttccgcgctcatacattcgcggagtaacgcataatggtaacgtaacgcctccagcaattgcttacggctaagattcgccgcaaggtaagggcgatgcagacgcacaggcagtcgcggctggcgcgttaacaatacattgagattaggccagtgggaaagttcgttcatccactcaacgcttaaacgcggcataatcaagctgcgcagcaaaaatttctggcgaaaactacggcgatgccagaatttacccggccgacactgtccacgtgccagactaagaaaaagactcaggctgctgagagattcagatggcgtaaaggtccgttcagttagctggctcatattcatgaaatcaatggttatacatggcgtgcttttcaccattgcgtatcttaaccaaacatcaatagtgtgattactaacgtaaattttagggttttgttgatatttcgttgaagttaatgacccggattggcatatggagtattcagaaaatttatgaaaaagcggaaaaccgtgaagaagcgttacgttattgcgctggtgatagtcatcgccggactgattacgttatggagaattcttaacgcacccgtgccgacttatcagacgctgattgtgcgccccggtgatttacagcaaagcgtgctggcgaccggaaagctggacgcgctgcgtaaggttgatgtgggcgcgcaggtcagcggtcagttgaaaactctgagcgtggcgattggcgataaagtaaaaaaagaccagcttttaggggttattgatcctgaacaggctgaaaaccagattaaggaggtcgaagcaacgctgatggagctacgtgcgcagcggcagcaggcggaagcggagctgaaactggcgcgggtgacgtattcccgtcagcaacgtctggcacaaacgaaggctgttagtcagcaggatctcgacaccgccgcgacggagatggctgtgaaacaggcgcaaattggcaccattgacgcgcaaatcaagcgcaatcaggcttctctcgatacggctaaaaccaatctcgattacactcgcatcgttgccccgatggccggggaagtcacgcaaatcaccactctgcaaggccagacggtgattgccgcacaacaagcaccgaacattctgacgctggcagatatgagcgccatgctggtaaaagcgcaggtttctgaagcggatgtaatccacctgaagccggggcaaaaagcctggtttacggtgcttggcgatccactgacgcgctacgaggggcaaatcaaggatgtactaccgacgccggaaaaggttaacgacgctattttctattacgcccgttttgaagtccccaaccccaatggtttgctgcggctggatatgactgcgcaagtgcatattcagctcaccgatgtgaaaaatgtgctgacgatccctctgagcgcgttaggcgatccggttggcgataatcgttataaagtcaaattgttgcgtaatggtgaaacacgcgagcgtgaagtgacgattggcgcacgtaacgataccgatgttgagattgtcaaagggcttgaagcgggcgatgaagtggtgattggtgaggccaaaccaggagctgcacaatgacgcctttgctcgaattaaaggatattcgtcgcagctatcctgccggtgatgagcaggttgaggtgctgaagggcatcagcctcgatatttatgcgggtgagatggtcgcgattgttggcgctagcggttccggtaaaagcaccctgatgaatattctcggctgtctggataaggccaccagcggcacctatcgcgtcgccggtcaggatgttgccacgctggacgccgatgcgctggcgcaactgcgccgcgagcatttcggctttattttccagcgttaccatttgcttagccatttaaccgccgagcagaacgttgaagtacccgccgtctatgctggtcttgagcggaaacagcgactgcttcgtgcccaggagttgctgcaacggctggggctggaagaccgtacagagtattatccggcacagcttagcggtggtcagcaacagcgcgtcagcatcgcgcgggcattgatgaacggtggtcaggtaattcttgccgatgaaccaaccggcgcactggacagccattctggcgaagaggtgatggcgatcctgcatcagctgcgcgatcgtgggcatacggtgattatcgtcacccacgatccgcaggtcgctgctcaggccgagcgggtgatcgaaattcgcgacggcgaaattgtgcgcaatcctcccgccattgaaaaagtgaatgttactggcgggacggaacctgttgtcaacacggtgtctggctggcggcagtttgtcagcggttttaacgaggcgctgacgatggcatggcgggcgctggcagcgaataaaatgcgtactttactgaccatgctggggattattatcggtattgcgagcgtggtttccattgtcgtggtgggtgacgccgccaaacaaatggtgctggcggatattcgttctattggtacgaatactattgatgtctatcccgggaaagattttggcgatgacgatccgcaatatcagcaggcgctgaagtacgacgacttaatcgccatccaaaaacaaccgtgggtcgccagtgccacacctgccgtcagccaaaacctgcgcctgcgttataacaatgttgatgttgctgccagtgccaatggcgtgagcggcgattattttaatgtctatggcatgaccttcagtgaaggaaacacctttaatcaggagcagctgaacggtcgtgcgcaggtcgtggttctcgacagtaatactcgccgccagcttttcccccataaagcagatgtggttggcgaggtgattctggtcggcaatatgcccgccagagtcattggtgtggcggaagaaaaacagagcatgtttggtagcagtaaagtgctgcgtgtctggctaccttacagcacgatgtccgggcgagttatgggccagagctggcttaactccattactgtcagggtgaaagaaggatttgacagcgccgaggcggaacagcaactcacgcgtttacttagtctgcgccacggaaagaaggatttctttacctggaacatggacggcgtcttgaaaactgttgaaaagaccacacgtactttacaactgtttctgacgctggtggcggtgattagcctggtggtgggcggtattggtgtaatgaatattatgctggtgagtgtgaccgagcggacgcgggaaattggcattcgcatggctgtaggtgcgcgagcaagcgatgttttgcaacagttcctgatcgaagccgtactggtttgcctggtcggtggcgcgttgggaataacactgagtctgttaattgctttcaccttgcagcttttcttacccggctgggagattggttttagtccgttggcgctgctgctggcgtttctctgcagcacggtcaccgggattttatttggctggttacccgcacgaaatgcggcacgactggatccagtagatgctctggcacgagagtaatttttgagataaaaatgccagccgatcgggctggcattttgcctttaggatgtacacaatgagacagaagagttatgcgactgccgcttctacttcgacgggcacaataacactggcgtgattgccttttggcccctggtggacatcaaactgaacggattgtccagcttttagcgttctgtaaccatccatctgaatggtggaataatgagcgaaaatatcttcgccgccgccttcagggcagatgaaaccaaaccctttggcattgttgaaccacttaacagtacccttttccatgcttcgacatccttcgcaaatcttatacaagtaagatggaataaaccggggtcagagagggggctgttcaaaacctcgccaactctagaaatacaatttagagaattagggcgagccgtcaagcatttgacaggggacaaggggcaggtatgaatcaaaaatttgaagcagttaacgctattgacaggaatgtgacagatgtcgctgatgccaacgatagatgatagttatctatcatgtggagtagattggtcaggcaaataagctcttgtcagcggcagggcgttctgccgataaccgtaaccgaagatgataactgacaatgggtaaaacgaacgactggctggactttgatcaactggcggaagaaaaagttcgcgacgcgctaaaaccgccatctatgtataaagtgatattagtcaatgatgattacactccgatggagtttgttattgacgtgttacaaaaattcttttcttatgatgtagaacgtgcaacgcaattgatgctcgctgttcactaccaggggaaggccatttgcggagtctttaccgccgaggttgcagaaaccaaagtggcgatggtgaacaagtacgcgagggagaatgagcatccattgctgtgtacgctagaaaaagcctgaatgcaggcataaaaattgggggaggtgcctatgctcaatcaagaactggaactcagtttaaatatggctttcgccagagcgcgcgagcaccgtcatgagtttatgaccgtcgagcacttgttactggcgctgctcagtaacccatctgcccgggaggcgctggaagcgtgttctgtggatttggttgcgctccgtcaggaactggaagcctttattgaacaaaccacacccgttctgcctgccagtgaagaggagcgcgacacacagccgacgctgagttttcagcgtgtactgcaacgtgcggtcttccatgtccagtcctccggtcgcaatgaggttaccggtgcaaacgttctggtcgctatctttagcgaacaggagagccaggcggcatatctgttgcgtaaacatgaagtcagccgtctcgatgtggtgaactttatctctcatggcacgcgtaaagacgagccgacacagtcttctgatcctggcagccagccaaacagcgaagaacaagctggtggggaggaacgtatggagaatttcacgacgaacctgaatcagcttgcgcgcgtgggcggaatcgacccactgattggtcgtgagaaggagctggagcgtgctattcaggttctctgccgtcgccgtaaaaacaacccgctgctggtgggggaatctggtgtcggtaaaaccgcgattgcggaaggtcttgcctggcgaattgttcagggcgatgtgccggaagtgatggctgactgtacgatttactctctcgatatcggttctctgttagcgggcacaaaatatcgcggcgactttgaaaaacgttttaaagcgttgctcaagcagctggagcaggacactaacagcatcctgtttattgatgagatccacaccattatcggtgcgggtgcagcgtctggtggtcaggtcgatgcggctaacctaatcaaaccgttgctctccagcggtaaaattcgtgtaattggtagcacaacctatcaggagttcagcaacattttcgagaaagaccgtgctctggcgcgtcgcttccagaaaattgatattactgaaccgagcatcgaagaaactgttcaaatcatcaatggcctgaaaccgaagtatgaagcgcaccacgacgtgcgttataccgcaaaagcggtgcgtgcggcggtagagctggcggtgaaatacattaacgatcgtcatctgccggataaagccattgatgttatcgacgaagcgggcgctcgcgcacgcctgatgccggtaagcaaacgcaagaaaaccgttaatgtggcggatattgagtccgtggtggcccgtattgcacgcattccagagaagagtgtttctcagagtgatcgtgataccctgaaaaacctcggcgatcgcttgaaaatgctggtcttcggtcaggataaagccattgaggcgctgactgaagccattaagatggcgcgtgcaggtttaggtcacgaacataaaccggttggtagcttcctgtttgccggccctaccggggtcgggaaaacagaggtgacggtacagcttagcaaagctttgggcattgagcttctgcgctttgatatgtccgagtatatggaacgccataccgtcagccgtcttattggtgcgcctccgggatacgttggttttgatcagggcggtttgctgactgatgcggtcatcaagcatccacatgcggtgctgctgctggacgaaatcgagaaagcgcacccggacgtgttcaatattctgttgcaggtgatggataacggtacgctgaccgataacaacggacgcaaagcagacttccgtaacgtggtgctggtgatgaccaccaacgccggggtacgggaaactgagcgcaaatccattggtcttatccaccaggataacagcaccgatgcgatggaagagatcaagaagatctttacaccggaattccgtaaccgtctcgacaacattatctggtttgatcatctgagtaccgacgtgatccatcaggtggtggataaattcatcgtcgagttgcaggttcagctggatcagaaaggtgtttctctggaagtgagccaggaagcgcgtaactggctggccgagaaaggttacgaccgggcaatgggcgctcgtccgatggcgcgtgtcatccaggacaacctgaaaaaaccgctcgccaacgaactgctgtttggtagcctggtggacggcggtcaggtcaccgtcgcgctggataaagagaaaaatgagctgacttacggattccagagtgcacaaaagcacaaggcggaagcagcgcattaatctgattgttaggtaggttggtcaagtccgtaatctcgaaagaggttacggactttttgtttatggggtggaggaggttcagaccctttttttaatgatgatggtaagttgttgataattagtgctgcgggaaggtaaggataaaaaagggtgctgcaggagaatgggatggttttgctttattaacaacgggctaaacgtgtagtatttgagttcactgccgtacaggcagcttagaaattcacaggtaacatactccacccgcccaccatgttcactgccgtacagacagataaaatgcgaaaaaaaagctcgcactttcgtacgagctcttctttaaatatggcggtgagggggggattcgaacccccgatacgttgccgtatacacactttccaggcgtgctccttcagccactcggacacctcaccaaattgttttgctaccaaacctcatgggtggcaacggggcgctactatagggagttggagtaaaacggtcaagaagaattttaatgataattattgtttgctcatactgtaaacaagttgtgcagtatatctacatcgagacaagttacggacttatacttccaaagtacttcatacatatcacaaaataaaaaggccggttaaaccgaccttttactcgttctttctcttcgcccatcaggcggtaaaacaatcagcgactacggaagacaatgcggcctttgctcaggtcgtacggggtcagttcaacagtcactttgtcgcccgtcaggatgcggatgtagtttttgcgcattttaccggagatgtgtgcagtaaccacgtgaccgttttctaactctacgcggaacatggtattaggcaacgtttcaagaacggtaccttgcatttcaatattgtcttctttggccatctaatcctctggggtatcactaccgtaatttgaaccggcaagataatgccgaagttctgtaaataagtaaagatttgcgcgctaaatcgcaacaaacaggttcggcacattactccgaaaacacacggctaagccgcaccaaaagcgcaacgtataagggagcggtgagataaacgatgggcgttacctgacgcgaaaaattccttatcggcagcggggtaatgagcgtaaccaactctgcgaccgcaattataacactctggggagaaatgtgccgaaaacattcattcttgtggactaaacaagcatcgtggtacccagaaattattcggcaatcgtccgaggcgcatttgattgagataattaaggtaatcccggcggggaatttcgcaggcaccaaggcttgctgtgtgatcgttaaggacctggcagtcgataagcttaccgccatgaccgataaattcctcacagaataccagaagcgccgttttagacgcattttccatccggctgaacatggactcgccacaaaatagcgttccctgggccacgccgtacataccgccgacaagctcatcttcacgccagacttcaatggagtgggcatggccgagttcgtgaaggcgatggtaggcttcgatcacgccacgcgtgatccaggttccttcttcgcgatcgctggcacagccttcaatgacctgaccaaaagcgtaattcatcgtgacacgataggggctgcgtttatgaaatcgcttcatactacggctgatatgcagactttctggccatagcaccgcgcggggatcggggctccaccagaggatggggtcgcctggagaaaaccacggaaaaataccacgctggtaagccattaacaggcgcgcagggctaagatcgcccccaagtgccagcaggccgttaggctcacgtaatgcgccttccggggaagggaaggctatactatggcgagaaagctgaaccaggcgcatgaccgcaaaactccacgcaagtcggatcgttcaataatagcttacaaaccctgcttgaactggtaataacgcccctgtctggcaagcagttctgcgtgagtaccttgctcaataatttgcccgttgtccatcactattatttgttggaaacgagagagtccgcgaagtcgatgggtgaccattaacaccgttttctcacgcatcatttctgcaagcaattcaaggatctggctttcggttgtggcatctaagccttcggtaggttcatccagcaacaccagtggcgcatcatgtaacagcgcacgggcgatagccagacggcgcagttcaccaccggagagctggcgtccgccttcacctaaccaactgttgagacctgcatcctcgagcagcttttccaggccaacgcgacgcaagatctcgctcagagcctcatcactactgccagggctggcgagtaaaagattatcacgcagcgtggcgctaaacagatgcactcgctgaggaacaacgctgatggtctgtcgtagagccgcttcattcaggctggctatggggctatcgttaagcaaaatctcgccctgttgcgggtcccatgcgcgggtcagctgttgtaacagtgtacttttgccgcatccggttcgcccgagaatcgctatatgttccccggcgtttacctgaagagaaatccctttaagtgcctgttgagattgctccggataagtgaactgaacatcccgtaacgtcaggctaacgcgatcggcaacacgagtttgggtatcaggaaaggtgacctccggtttttgatccgttaagtcagagatacgtacggcagaggcaatgacttgccccagatgctgaaatgcacccgttactggtgccagtgcttcaaacgcggctaacgcgcagaagacaaacagggcaattaacgcgccgggttgagcattgccgccaacgccgccagacgccatccacagcatcaggatcaccgctaacgcgccaatgagcagcattatcgcttggctcaatgcggtcagttcagattgacggcgttgcgcttccagccattgaatttctgtattctctagttgcgtgcgataacgatcgctggcaccaaaaatggtcagctcagcttgcccttgcagccaggccgtcagttgttggcgatactgtccgcgaagatgagtcagattttgcccggtgctttttcccgcacgataaaacagcggtggcatcaggaaaagcgtcagtaacataatgccgcccagcgtaaaggcgagggtgaaatcaaggaaacttaacccgattgtcaccaccataatcaccacaaaagcgcccaccagcgggctgataacgcgcaggtaaagatgatcgagcgtatcaacatccgccaccacgcgattgagcaattcgccctgacgatagcgcgccagtccggcaggggagaggggcagcaatttgctgaaggtgtaaatgcgcagatgctgcaacacgcggaaagtcgcgtcgtgacttaccagacgttcaaaatagcgcccggcagtacgggtgattgctgcgccacgcacgcccgcagcgggtagcatatagttgaagctgtacagtccggcaacccccgcaaccgcactggcgctgaggaaccagccggaaagtgtcaacagaccgatactggcgagcagcgtcacaattgccagcacaataccaagacttaacatccatttatgacgtttatacagtgccagatagggtagcaaagcgcgcatttaaatctcctcctgacgatgggccagtaatgtggcgaatgggccaccagccacacttaattccgcgtaacgtccttgctcaataatccggccatcctgcataacccaaatgacatcccagtcagcaagatcttctaactggtgggtgaccattaacgttgtctggcgcagagaggcggcattcagcgcctccattacgcgctgttcactgtgagcatcaaggctggcagcgggttcatccaacagtaataggctacagggatttagtaacgcacgggccaccgccacgcgctgcgcctgccccacggaaaggcgggcagcctggtcgccaacaggcgtatcaacgccttgtgggaggagcggtagaaactcgctgacccaggcgttatccagcgctgcttgtaattcttgttcgctggcatcaggtcgcgccagtagtacgttatcccgcaatgttgctgccggtaattgtgggttttgcccaacccaggagagatgtttacgccaactttctggacttaaatcgcgtaattctatcccgttgattcgtaggcttccctgataactgagaaaaccagaaagcgcgttcagcagactgcttttaccactaccgctgcgaccaaccaacaccgcacgttggcctgctggcaaagtaaagttcagcggtccggccagcgttttaccttccgggctcgtgataaacagctcctcggcctcaatggtcaccggatcggtgcttgctaattccgcctcaccacgttgcggatgggcgagcggggtttccataaacgttttcagactgtcagctgcgccaacagcctgggctttagcatgataaaacgtaccgagatcgcgtaatggctggaaaaactctggcgcaaggatcagggccagaaaacccgcagccagcgtcacaccggtatcgtagtgaccaaaatccagctcgccgagataggaaaaaccaaagtagaccgccaccagagcaatactcaggctggtaaaaaattcgagaatgccggaggataaaaacgccagccgtagcacttccattgtccgttggcggaaatcttcgctagcagaacgaatactttcaatttcagcttcaccacgaccaaaaatacgcaatgtttccatgccgcgcaggcgatcgaggaaatgcccacttaagcgagcaagagcgagaaagttacgtcggttagcatcggcagcccccattccaaccagcgccataaacaacggaattaacggtgcagtgcccagcagaatgagcgccgcagcccagttagaggggaagattgccaccacaatcagcaacggcacgctcactgccagcgccatttgcggcagatagcgtgcatagtaatcatgcatatcgtcaatttgctcgagtaccagcgtcgcccagctccccgcaggtttaccctgaatccacgctggccctgcttgttgcagacggtcgagaacctgacggcggatggcaaagcggatatgctgcccggcgtgataacccacccgttcgcgtaaccagaccacccatgcgcgcagtacaaaggtcagaaccagtaacgtaaagggaagcagcagggcttcacggggaatattctccataatcatatgttgcagaattcgcgccatgaaccaggcctgggcaatgatcaatatgccgctcacaaagcccagcagacgagaaatattcagccaacgttgggagatgacgctttgctgttttaaccagcgggttaactctttttgacgagatttattcattgcacgcttagcaggtgagttatcagaattatttgcagagcaatgttacaacggggaaaaaataaaggcgacccatagtcgcatggtgtcgccttctttacttttgttactgatttgtaaaattattttgcgtcagctaaaccatcgaggtagcgttccgcatcaagtgctgccatgcagcctgtaccggcgctagtaatggcctggcgataaatgtgatccatcacgtcgcctgcggcaaagacgccaggaatgctggtctgggtggcattaccatgaataccgctctgtactttgatgtagccgttttccagttccagctgcccttcgaaaatcgcagtattcgggctgtgaccgatagcaacaaacagaccggcaacgtcgagactctcgatgttatcgctgttttgcgtatcgcgcagacgaacgccagtgacacccatttgatcgccggtcacttcttccagcgtacggttggtgtgcagaatgatgttgccgttctccactttatccatcaggcgcttaatgaggattttttccgcgcggaaaccgtcacggcggtgaatcagatgcacttcgctagcgatgttagacagatacagcgcctcttcaaccgcggtattgccgccgccgatgaccgcaactttctggttgcgatagaagaaaccgtcgcaggttgcacaagcagaaaccccacggcctttaaaggcttcttcagagggcaggccgagatagcgtgcagaagctccggtggcaataatcagcgcgtcgcaagtgtattcgccgttatcgccattcagacggaacggacggttttgcagatccaccttgttgatatgatcaaaaatgatctcagtttcaaacttggtggcatgttcgtgcatgcgctccattaataacggaccggtcagatcgtttggatcgccaggccagttttccacttccgtggtggtggtcagttggccgcctttttccatgccggtaatcagcacaggttgcaggttggcgcgcgccgcgtagacagcagcggtgtatcccgccgggccactacccaggataagcagtttactgtgtttggtcgtgcccatgagatccccatagttgttggcagacaatgggcaggattgtagggaatttacagacgtaaaaaaagagtatgacgattttgttaacaatttgtgcaatcggcagcatcgataagcaggtcaaattctcccgtcattatcacctctgctacttaaatttcccgctttataagccgattaaatgatgaataaacgcccctgttaatgaatatctggcatgttgtactaaaaatcgatgttttgctttgacaatcccctggtgttttgcgaaaacattcgaggaagaaaaaaaacagtattcttatatgcgcataaccatgcatgtaaataccatgtttaccgtgctagtgaaatctacgtatggcgtggacagacgccattcgtgatgtcgatagctgccacaaggcaacggtcttctcaccgtagacccaggcattgcgcgccgtgaatcttcatgatttcggtctatcgtgacgggtagcgactctgaacagtgatgtttcagggtcagacaggagtagggaaggaatacagagagacaataataatggtagatagcaagaagcgccctggcaaagatctcgaccgtatcgatcgtaacattcttaatgagttgcaaaaggatgggcgtatttctaacgtcgagctttctaaacgtgtgggactttccccaacgccgtgccttgagcgtgtgcgtcggctggaaagacaagggtttattcagggctatacggcgctgcttaacccccattatctggatgcaagtcttctggtattcgttgagattactctgaatcgtggcgcaccggatgtgtttgaacaattcaataccgctgtacaaaaacttgaagaaattcaggagtgtcatttagtatccggtgatttcgactacctgttgaaaacacgcgtgccggatatgagtgcctaccgtaagttgctgggggaaaccctgctgcgtctgcctggcgtcaatgacacacggacatacgttgttatggaagaagtcaagcagagtaatcgtctggttattaagacgcgctaacacggaacaggtgcaaaatcggcgtattttgattacactcctgttaatccatacagcaacagtactggggtaacctggtactgttgtccgttttagcatcgggcaggaaaagcctgtaacctggagagcctttcttgagccaggaatacattgaagacaaagaagtcacattgacaaagttaagtagcggccgccgccttctggaggcgttgctgatccttattgtcctgtttgccgtctggttgatggctgccttactaagctttaaccctagcgaccccagctggagccaaacggcctggcatgaacctatccataatttaggtgggatgcccggtgcgtggttggcagatacgctgttctttatttttggcgtgatggcttacaccattcccgtcattattgtcggcggttgttggtttgcctggcgtcatcagtccagcgacgaatacattgattattttgccgttagcctacgcatcattggcgttttggcgctcatccttacctcctgtggtctggcggcaatcaacgctgacgatatctggtattttgcctccggtggcgtcattggcagcttactaagcactacgctacaaccactgctacacagtagcgggggaactattgcgctgctctgcgtttgggcagcgggcctgacgttgttcaccggttggagttgggtgaccattgctgaaaaactcggcggctggattttaaacattctcaccttcgccagtaatcgtacccgtcgcgatgatacctgggtcgatgaagatgagtatgaagacgacgaagagtatgaagatgaaaatcacggcaaacagcatgaaagtcgccgtgcccgtattcttcgcggcgcgctagcgcgtcgtaaacggttggcggaaaaattcattaatccgatggggcggcaaacagacgctgcgttgttctccggtaagcggatggatgatgacgaagagattacctacactgcacgcggtgtggctgccgacccggacgacgtcctatttagcggcaatcgtgcaacgcagccagaatatgacgaatacgatccattattaaacggtgcgccaattaccgaacctgtcgctgtagcagctgctgctaccacggcgacacaaagctgggctgcgccggttgaacctgtgactcagacgccgcctgttgcctctgttgatgttccacctgcgcaacctacagtagcctggcagcctgtaccgggtccacaaacgggagagccggttattgctcctgcaccggaaggttacccacagcagagtcaatatgcgcagcctgcagtgcaatataatgagccgctgcaacaaccagtacagccgcagcagccgtattatgcacctgcagctgaacaacctgcgcaacagccgtattatgcccctgcgccagaacaaccggtggcaggtaacgcctggcaagccgaagagcagcaatccacttttgctccacagtctacataccagactgagcaaacttatcagcagccagccgctcaggagccgttgtaccaacagccgcaacccgttgaacagcagcctgttgtggagcctgaacccgttgtagaagagacaaaacccgcgcgtccgccgctttactactttgaagaagttgaagagaagcgagcccgtgaacgtgaacaacttgcggcctggtatcaaccgattccagaaccggttaaagaaccagaaccgatcaaatctagcctgaaagcaccttctgttgcagcagtacctccagtagaagccgctgccgctgtttccccgctggcatctggcgtgaaaaaagcgacactggcgacgggggctgccgcaaccgttgccgcgccagtcttcagtctggcaaatagcggtggaccgcgtcctcaggtcaaagaggggattggtccgcagttgccacgaccgaaacgtatccgcgtgccaactcgtcgtgaactggcgtcttacggtattaagctgcccagtcagcgtgcggcggaagaaaaagcccgtgaagcccagcgcaatcagtacgattctggcgatcagtacaacgatgatgaaatcgatgcgatgcagcaggatgaactggcacgtcagttcgcccagacacagcagcaacgctatggcgaacagtatcaacatgatgtgcccgtaaacgcagaagatgcagatgctgcggcagaggctgaactggctcgtcagtttgcgcaaactcaacaacaacgttattccggcgaacaaccggctggggcgaatccgttcagcctggatgattttgaatttagcccaatgaaagcgttgctggatgatggtccacacgaaccgttgtttacgccaattgttgaacctgtacagcagccgcaacaaccggttgcaccgcagcagcaatatcagcagccgcaacaaccagttccgccgcagccgcagtatcagcagccacaacagccggttgcgccgcagccacaatatcagcagccgcaacaaccggttgcgccacagcagcaatatcagcagccgcaacaaccggttgcgccgcagcagcagtatcagcagccacaacagccagttgcgccacaaccgcaggataccctgcttcatccgctgttgatgcgtaatggcgacagccgtccgttgcataaaccgacgacgccgctgccttctctggatttgctgacaccgccgccgagcgaagtggagccggtagatacctttgcgcttgaacaaatggctcgcctggtggaagcgcgtctggctgatttccgtattaaagccgatgtcgtcaattactctccggggccggttatcactcgctttgaattgaacctggcaccgggcgtaaaagcggcgcgcatttctaacttgagtcgggaccttgcccgtagtcttagcacggtggcggtgcgtgtcgttgaagttattcctggcaaaccctatgtaggtctggagttaccgaataaaaaacgacaaaccgtttatctgcgcgaagttttggataacgccaaattccgcgataatccgagcccattaaccgtggtgctgggtaaagatatcgccggtgagccggtggttgccgatctggcgaaaatgccgcacttgttggttgcggggactaccggttccggtaaatctgtcggtgtgaacgcgatgatcctgagcatgctttataaagcacagccagaagatgtgcgtttcatcatgatcgacccgaaaatgctggagcttagcgtttatgaaggcattccgcatctgttaacggaagtcgttactgatatgaaagatgccgccaacgcgctgcgctggtgtgttaacgagatggagcgtcggtataaactgatgtctgcgctgggtgtgcgtaatctggcgggttataacgaaaaaattgctgaagccgatcgcatgatgcgtccgattccagacccgtactggaagccgggtgacagtatggatgcccagcatccggtgctgaaaaaagaaccatacattgtggtgttggttgacgaatttgccgacctgatgatgacggtaggtaaaaaagtggaagagctgatagcacgtctggcgcaaaaagcccgtgccgcgggtatccacctcgtactggcaactcagcgtccaagcgttgatgttattactggtctgattaaagcgaatattccgacccgtatcgcctttaccgtatccagtaagattgacagtcgtaccattcttgatcaggctggcgcggaaagtctgctgggtatgggggatatgctctactctgggccgaactccacgttgccggtacgtgtccatggtgcttttgttcgcgatcaggaagttcatgccgtggtgcaggactggaaagcgcgtggtcgcccacagtatgttgatggcatcacctccgacagcgaaagcgaaggtggtgcgggtggtttcgatggcgctgaagaactggatccgttgttcgatcaggcggtgcagtttgtcactgaaaaacgcaaagcgagtatttctggcgtacagcgtcagttccgcattggttataaccgtgcagcgcgtattatcgaacagatggaagcgcaggggattgtcagcgaacaggggcacaacggtaatcgtgaagtgctggccccaccgccgtttgactaactaatgcatcgtatgccggataaggcgcggtagcgtcgcatccggcactctatcaactgaaaattcagtattttcttctttcctcaagctgattattagcctggaatagagagtagagggaactcccgatcgggagtgacgtaatttgaggaataatgatgaaaaaaattgccatcacctgtgcattactcagtagcttagtagcaagcagcgtttgggctgatgccgcaagcgatctgaaaagccgcctggataaagtcagcagcttccacgccagcttcacacaaaaagtgactgacggtagcggcgcggcggtgcaggaaggtcagggcgatctgtgggtgaaacgtccaaacttattcaactggcatatgacacaacctgatgaaagcattctggtttctgacggtaaaacactgtggttctataacccgttcgttgagcaagctacggcaacctggctgaaagatgccaccggtaatacgccgtttatgctgattgcccgcaaccagtccagcgactggcagcagtacaatatcaaacagaatggcgatgactttgtcctgacgccgaaagccagcaatggcaatctgaagcagttcaccattaacgtgggacgtgatggcacaatccatcagtttagcgcggtggagcaggacgatcagcgcagcagttatcaactgaaatcccagcaaaatggggctgtggatgcagcgaaatttaccttcaccccgccgcaaggcgtcacggtagatgatcaacgtaagtaaaggcacctgagtgagcaatctgagcctcgattttagcgataatacttttcaacctctggccgcgcgtatgcggccagaaaatttagcacagtatatcggccagcaacatttgctggctgcggggaagccgttgccgcgcgctatcgaagccgggcatttacattctatgatcctctgggggccgccgggtaccggcaaaacaactctcgctgaagtgattgcccgctatgcgaacgctgatgtggaacgtatttctgccgtcacctctggcgtgaaagagattcgcgaggcgatcgagcgcgcccggcaaaaccgcaatgcaggtcgccgcactattctttttgttgacgaagttcaccgtttcaacaaaagccagcaggatgcatttctgccacatattgaagacggcaccatcacttttattggcgcaaccactgaaaacccgagctttgagcttaatagcgcactgctttcccgtgcccgtgtctatctgttgaaatccctgagtacagaggatattgagcaagtactaactcaggcgatggaagacaaaacccgtggctatggtggtcaggatattgttctgccagatgaaacacgacgcgccattgctgaactggtgaatggcgacgcgcgccgggcgttaaatacgctggaaatgatggcggatatggccgaagtcgatgatagcggtaagcgggtcctgaagcctgaattactgaccgaaatcgccggtgaacgtagcgcccgctttgataacaaaggcgatcgcttttacgatctgatttccgcactgcataagagcgtacgtggtagcgcacccgatgcggcgctgtactggtatgcgcgaattattaccgctggtggcgatccgttatatgtcgcgcgtcgctgtctggcgattgcgtctgaagacgtcggtaatgccgatccacgggcgatgcaggtggcaattgcggcctgggattgctttactcgcgttggcccggcggaaggtgaacgcgccattgctcaggcgattgtttacctggcctgcgcgccaaaaagcaacgctgtctacactgcgtttaaagccgcgctggccgatgctcgcgaacgcccggattatgacgtgccggttcatttgcgtaatgcgccgacgaaattaatgaaggaaatgggctacgggcaggaatatcgttacgctcatgatgaagcaaacgcttatgctgccggtgaggtttacttcccgccggaaatagcacaaacacgctattatttcccgacaaacaggggccttgaaggcaagattggcgaaaagctcgcctggctggctgaacaggatcaaaatagccccataaaacgctaccgttaatgttatcgttgcggtaatgttgttactgtatccctgtggtcgcaggctgtggccacatctcccatttaattcgataagcacaggataagcatgctcgatcccaatctgctgcgtaatgagccagacgcagtcgctgaaaaactggcacgccggggctttaagctggatgtagataagctgggcgctcttgaagagcgtcgtaaagtattgcaggtcaaaacggaaaacctgcaagcggagcgtaactcccgaagcaaatccattggccaggcgaaagcgcgcggggaagatatcgagcctttacgtctggaagtgaacaaactgggcgaagagctggatgcagcaaaagccgagctggatgctttacaggctgaaattcgcgatatcgcgctgaccatccctaacctgcctgcagatgaagtgccggtaggtaaagacgaaaatgacaacgttgaagtcagccgctggggtaccccgcgtgagtttgactttgaagttcgtgaccacgtgacgctgggtgaaatgcactctggcctcgactttgcagctgcagttaagctgactggttcccgctttgtggtaatgaaagggcagattgctcgcatgcaccgcgcactgagccagtttatgctggatctgcataccgaacagcatggctacagtgagaactatgttccgtacctggttaaccaggacacgctgtacggtacgggtcaactgccgaaatttgctggcgatctgttccatactcgtccgctggaagaagaagcagacaccagtaactatgcgctgatcccaacggcagaagttccgctgactaacctggtgcgcggtgaaatcatcgatgaagatgatctgccaattaagatgaccgcccacaccccatgcttccgttctgaagccggtagttatggtcgtgacacccgtggtctgatccgtatgcaccagttcgacaaagttgaaatggtgcagatcgtgcgcccagaagacagtatggcggcgctggaagagatgactggtcatgcagaaaaagtcctgcagttgctgggcctgccgtaccgtaaaatcatcctttgcactggcgacatgggctttggcgcttgcaaaacttacgacctggaagtatggatcccggcacagaacacctaccgtgagatctcttcctgctccaacgtttgggatttccaggcacgtcgtatgcaggcacgttgccgcagcaagagcgacaagaaaacccgtctggttcataccctgaacggttctggtctggctgttggtcgtacgctggttgcagtaatggaaaactatcagcaggctgatggtcgtattgaagtaccagaagttctgcgtccgtatatgaacggactggaatatattggctaatacccaatttttctgaatctaaaaagcgcctgcgggcgctttttttgtctccctttgataccgaacaataattactcctcacttacacgtaatactactttcgagtgaaaatctacctatctctttgattttcaaattattcgatgtatacaagcctatatagcgaactgctatagaaataattacacaatacggtttgttactggaatcaatcgtgagcaagcttgagtgagccattatgaaaacgaaaatccctgatgcggtattggctgctgaggtgagtcgccgtggtttggtaaaaacgacagcgatcggcggcctggcaatggccagcagcgcattaacattaccttttagtcggattgcgcacgctgtcgatagcgccattccaacaaaaagtgacgaaaaggttatctggagcgcctgtacagttaactgtggtagtcgctgcccgctacgtatgcacgtcgtggacggtgaaatcaaatatgtcgaaacggacaataccggcgatgacaattacgacggcctgcaccaggttcgcgcctgcctgcgtgggcgttccatgcgtcgccgtgtctacaatccggaccgcctgaaatatccgatgaaacgagtcggggcgcgcggtgaaggcaaattcgagcgcattagctgggaagaagcctacgacatcatcgcgaccaatatgcagcgcctgatcaaagagtacggcaacgagtctatctatctgaactatggcaccggtacgctgggcggcaccatgacccgctcctggccgccgggaaataccctggtcgcgcggctgatgaactgctgcggcggctatctgaaccattacggcgactactcctccgcgcaaattgcggaaggtttgaactatacctacggcggctgggcagatggcaacagcccgagcgatatcgaaaacagtaagctggtagtgctgtttggtaataaccctggcgaaacgcgaatgagtggcggtggggtgacttactatcttgaacaggcacgccagaaatctaatgcccgcatgatcatcatcgatccgcgctataccgacaccggtgccgggcgcgaagatgagtggatccctattcgtccgggaacagatgccgcactggttaacggtctggcgtacgtcatgatcactgaaaacctggtggatcaggcattcctcgataaatattgcgttggctacgatgagaaaaccctgccagccagtgcgccgaaaaatggccactataaagcttatattctgggtgaagggccagatggcgtggctaaaacgccggaatgggccagccaaatcactggtgttccggcagacaaaatcatcaaattggctcgtgaaatcggtagtaccaaaccggcgtttatcagccagggatggggcccgcagcgtcacgctaacggtgaaatcgcaacccgtgctatcagcatgctggcgattctgaccggtaacgttggtattaacggaggcaacagcggcgcgcgtgaaggtagttacagcttaccgtttgtccgtatgccgaccttggaaaacccgatccagaccagcattagcatgtttatgtggaccgatgccattgaacgtggcccggaaatgacggcgctgcgtgatggtgtacgcgggaaagataagctggatgtgccgatcaaaatgatctggaactatgccggtaactgcctgattaaccagcattctgaaatcaaccgtacccatgaaatccttcaggatgataagaagtgcgagctgattgtggttatcgactgccacatgaccagtagcgcgaaatatgctgacatcctgctgcctgactgcaccgcttccgaacagatggactttgcgctggatgcatcctgcgggaatatgtcttacgtgattttcaacgatcaggtgattaaaccgcgctttgaatgtaagaccatctatgaaatgaccagcgaactggcaaaacgtcttggcgttgagcaacagtttactgaaggccgtacccaggaagagtggatgcggcatctgtatgcccagagccgggaagcgattcctgaactgccaacgtttgaagagttccgcaagcaggggatctttaaaaagcgcgacccacaagggcatcacgttgcttataaagccttccgtgaagatccgcaggcaaacccactgactacgccaagcggcaaaattgagatttatagccaggcgctggctgacattgccgctacctgggaattgcctgaaggcgatgtgatcgatccactgccgatctacacgccgggctttgaaagttatcaggatccgctgaacaaacagtatccgctgcagcttacaggtttccactataaatctcgcgttcacagtacttacggcaacgttgatgtgctgaaagcggcttgccgtcaggaaatgtggatcaacccgcttgatgcccaaaaacgcggtatccacaacggcgataaagtcaggatctttaacgatcgtggtgaggttcatattgaggcgaaagtgacgccacgaatgatgccgggtgtggtcgcactgggtgaaggtgcctggtatgacccggatgcaaaacgtgtcgataagggtggttgtattaacgtactgaccactcaacgtccgtctcctctcgctaaggggaatccgagtcatacaaaccttgttcaggttgaaaaggtgtaaggagtaaccgatgacaacccagtatggattttttattgattccagccgttgcaccggttgcaaaacctgcgagctggcctgtaaagactacaaagatttgacgccagaagtcagcttccgccgcatttatgaatatgctggcggcgactggcaggaagataacggtgtctggcaccagaacgtgtttgcctactatctgagcattagttgtaaccactgcgaagatccggcttgtactaaagtctgcccgagcggtgcgatgcataaacgtgaagatggttttgttgtggtcgatgaagatgtgtgcattggctgccgctactgccatatggcttgcccgtatggcgcaccgcaatataacgaaacgaaaggccatatgaccaaatgcgatggttgttatgaccgtgttgcggagggtaaaaagccgatctgtgttgaatcttgtccgctgcgggcgctggatttcggccctatcgacgagctgcgtaaaaaacatggcgatctggcggccgttgcgccgttgccgcgagctcactttaccaaaccgaatattgtgatcaaacccaatgccaatagccgcccgaccggggataccactggctatctggcaaacccgaaggaggtgtgagatgggaagtggatggcatgaatggccgctgatgatcttcacggtcttcgggcaatgtgtagcaggtggttttatcgttctggctttggcgctgctcaaaggcgacctgcgagcagaagcccagcagcgtgttatcgcctgcatgtttggtttatgggtgctgatgggcattggctttatcgcctctatgctccatcttggtagtccaatgcgcgcttttaacagcctcaaccgggtaggggctagtgcactcagtaacgaaatcgccagcggtagcatcttttttgccgtaggcggcatcggctggttgctggcaatgctgaaaaagctgagtccggcattgcgtacgctgtggctgatagtgacgatggttcttggcgtcatctttgtctggatgatggtgcgtgtgtataacagcattgataccgttccgacctggtacagcatctggacgccgatgggcttcttcctgacgatgtttatgggcggcccgttactgggttacctgttgttgagtctggctggcgtcgatggctgggcgatgcgtctgctgccagcaatttctgtactggcactggtagtgagtggcgtggtgagtgtgatgcagggcgcagagctggcgactattcatagttctgtgcagcaggccgcagcgctggtgccggactatggtgcgctgatgtcctggcggatcgtgcttttggccgttgccctgtgcttgtggattgcaccacagctaaaaggttatcagcctgcggttccgctactttctgtaagtttcattctgcttctggcaggggaattaatcggtcgcggcgtattctatggtttgcatatgaccgtggggatggccgtcgcaagctaatcataacaaccggggtttcggccccggttctcttttatttctgcttcgttaacgtgtcataactggtcatcaaattacgataatcaggaatgtggttagagaacaacgtcgccagtccttcaatatcattacgccagtcgcgatgcagctcgcacgccacgccgaaccatgtcatcaattgcgcaccagcttggctcaagcgatcccatgcgctatgccgggtaatttcattaaaggtcccactcgcgtcagtcacgacaaagacgtcaaacccttcttcaatggcactaagcgccgggaatgccacgcaaacttcggttaccacaccggcaataattaactgttttttacctgtcgctttgacagcttttacaaaatcttcgttatcccaggcgttaatatttcccgggcgagcaatgtaaggtgtatcggggaattgtgctttcagttctggaactaatgggccgttaggaccggtttcaaaactggtggtaagaatagttggtaagttgaaatacttagccaggtcacccagcgccagcacgttatttttaaacttatcgggttcgatatcccgtacaagggaaagtaaaccagcctggtgatcaacaagcaaaacggcagcatcatttttatcaagacgaacatacggtttggtcatcctcttctcctttcgagagtcagtggtacgtctgaaatcgatcagacgcgatgcattgctctgaaagcatagacgggaaatatgagtttgctgtgaccatgaaatttttcgactgaacgaagcgtatgaaatttgtgttagttcaataaaaacaatcagatgagactaatcatctcttcagcattagcgttatgaatgagtaatataaatcgataataccgccgctgggatatcgcgtattttcacccattgacaatgtttttggcggtggcatgatgcgcatgaaatttgaacttcctcacggttttaattcatgtccacgtatacccagcctgtcatgcttttgctgtctggcctgcttttgttgactctggcgattgcggtgttaaatacactcgtgccgctttggctcgcccaggaacacatgtccacatggcaggtaggcgttgtcagcagttcctattttaccggcaaccttgtcggtacattgctgacagggtatgtcattaagcgcattggctttaaccgcagctattatctggcctccttcatttttgccgctggctgtgccggccttggcctgatgattggattctggagctggttggcttggcgttttgtcgcgggcgtcggctgtgccatgatttgggtggttgttgagagcgcgctgatgtgcagtgggacgagtcgtaaccgtgggcgtttgcttgctgcgtatatgatggtttattacgtgggaacgtttttaggccagttactggtcagcaaagttagtaccgagctgatgtccgtattgccgtgggttacaggtttgacgttggcagggatcttaccgctgttgtttacgcgtgtgctgaatcagcaggctgaaaaccatgatagcacgagtattacgagtatgctaaaactccgtcaggcgcggcttggcgtgaatggctgcattatcagtggaatcgttctgggatctctatatggcctgatgccgctgtacctcaatcacaaaggggtgagcaatgccagcattggtttctggatggcggtactggtcagtgcgggtatccttggacaatggccgattggacgtctggcggataagtttggtcgactgctggtgttgcgtgttcaggtctttgtcgtcattctcggcagtatcgcgatgcttagccaggcggcgatggccccagcgttattcatcctcggtgccgctggctttacgctatatccggtggcgatggcatgggcttgcgagaaagttgaacatcatcaactggtggcgatgaaccaggccttactgttgagctatactgtgggaagcctgcttggcccgagttttaccgctatgctaatgcagaatttctccgataatttattgtttatcatgatcgccagcgtaagctttatctatttgctgatgctgctgcgcaacgccggtcatacgccgaaacccgttgctcacgtgtaaatgaattcaagcagagtgtgaacttactgtttcacactctgcttttttgtttcttctatctgacttgctttattccaaattttattcgtttaaaaataaaatgtgcagcaggttataattttgcatttcgctatttccgcacttcttatttgccgcgcataatccctcgttttaccgatgcccctttaattttggcgaaggatttgtctatggctgggaatgttcaggaaaaacagttgcgatggtacaacattgcgctgatgtcttttatcactgtctggggttttggcaacgttgttaataactatgccaaccaggggctggtggttgtttttagttgggtgtttatctttgcactctatttcacaccttatgcgctaattgttggtcagttaggcagcaccttcaaagatgggaagggcggggtcagtacctggattaaacacacgatgggacccggactggcttatctcgccgcgtggacctactgggtggtgcatattccctatctggcacaaaaaccccaggcaattctgattgcgctcggttgggcgatgaaaggcgacggtagcctaatcaaagaatatagtgtcgtagcgttacaggggttaacgctggtgctgtttatcttctttatgtgggttgctagtcgcggtatgaaaagcctgaaaatcgtcggttctgtggcagggattgctatgtttgttatgagtctcctgtatgtggcgatggcggtaaccgcgcctgcaattactgaagtgcatattgcgaccacaaacattacctgggaaacgttcattcctcatatcgactttacctacattaccactattagtatgctggttttcgcggttggcggagcagagaagatttctccttacgttaatcaaacgcgcaacccaggaaaagaatttccaaaagggatgttatgcctggcggtgatggttgcggtttgtgccattctgggcagcctggcgatggggatgatgtttgatagccgtaatatcccggatgacttaatgaccaacggtcagtattacgcctttcagaagctgggcgagtattacaacatgggtaatactttaatggtgatttacgccattgcgaataccctgggacaagtagcggcgctggtattcagcattgatgccccgcttaaagtgctattaggtgatgctgacagcaaatatattccagccagtttatgtcgtaccaacgcttctggtacgcccgttaatggctattttctgaccctggtactggtggcgattctgattatgctgccgactctcggcattggtgatatgaacaatctctataaatggctgttgaaccttaatagcgtagtgatgccgctgcgttatttatgggtatttgttgcatttattgcagtcgttcgcttggcgcagaaatataaaccagaatatgtctttattcgtaataagcctctggcaatgaccgtcgggatttggtgttttgcctttaccgcctttgcctgtttgacggggatcttcccgaaaatggaagccttcactgcagagtggaccttccagttggcgctgaatgttgcaacgccgtttgtgctggtaggattaggactgatattcccgctgctggcgcgtaaagcgaatagtaaataattattgtggtcggtgacgctgactctggcagatctgacccgtttttacataatcgagaaatgcgcgcaagccgcaggacatatactggcggtttggataatagatctggaagcctggacgctctgtgctccagtcttccagtacacattctaaacgaccagtatcaaggtactccttgatctgttcatagagcagatacccgataccagcacccatcaaaacggcctccagttcagcatcaacatcatccagaatgatatttcctgcgacagcaatttccagctcctttgcaaattgccagtggaaaggtttgccgctgggataacgaaaaacaacacattgatgattaagcagatcatgaggatggcggggtttgccatatcttgcaaagtactctggcgttgctgctacacataatttcactggcgggccgatcgccacgctgatcatatctttttcgacgatgcaactaagtcgaacgccagcgtcaaagccctgttggacgatatcgacaagagagtcgtcagttgtgagctcgactttaatatcaggatattcacgtgtgaaaccaaccagtaaagacattaaaaatatacgtgcagctacccgggcggcattgattttgagcgttcctgtcggtgtcagacgaaaatcattcatctcatctaacatgatctgaatttcgtcgaaagctgggcgcaatcgttcatagagattagaacccgcttccgttaagcttacgcttcgggttgtccgattgaataagcgaattttaagacgttgttccagtgttttaatactatggctaatggcggagctggataagcctaactcatcgcccgctgcacgaaagctttgattacgggccacggcaaagaaagtggcaaagtcagacatattcatccgcattagtgaaaatccttcattaactcatcctgaatcatcacgtttacaggattatgccgcctgcgtaaagtgcgctccagaacttaacgtggaggtaaaattatgcagtctgaacgtatttatttggtatgggcccatcctcgtcatgatagtttgaccgcacatattgctgatgcgatccatcagcgggcaatggagcggaaaatacaggtgacggaactcgatttatatcggcgtaatttcaacccagtgatgacgccggaagatgaaccagactggaagaatatggataaacgttattctccagaggttcatcagctttatagtgagctgcttgaacatgacacgttagtggtggtttttcctctctggtggtacagcttcccggcaatgctaaaaggatatattgacagagtatggaataatgggctggcttatggagatgggcacaaattaccattcaataaagttcgttgggtggcgctggttggaggagacaaagaaagttttgtccagatgggctgggaaaaaaatataagcgattatttaaaaaatatgtgcagttatcttggtattgaagatgccgatgtcactttcttgtgtaatacagtggtattcgatggggaagaacttcacgcgagctattatcagagcttattatctcaggtacgggatatggtagatgcactataagatgtgttaaaaacgctgtagcagaatgaagcgcggaataaaaaagcggcaactcaataaagttgccgctttacggggaaattagaacattaccttatgaccgtactgctcaagaatgcctttcacgcgttccatggtctctttcttcggtggtttaacaccgtcgagtttgtactcttcacccattgccacccatttgtgtttgcccagctcgtggtaggggagaagctcgattttctcaacgttgcccatatcacgggtaaattcaccgaggcgatgcgcactatcgtcatcgtcagaccagcctgggacaacaacgtagcggatccacaccttcacatttttgttcgccagatatttagcgaactccagcgtgcggtggttggaaactccaaccagattttggtggatctcgtcgttcatctgtttgagatcgagcattaccaggtcggttacttccagcagttcatcaatcaccggatcgtaacgacgaacaaaaccgttggtgtccagacaggtatgaatgccttcttttttgcaggcgcggaaccagtcacgaacaaactcagcttgcaggattgcttcaccgccggatgcggtaacgccgccgccggaagcgttcataaagtggcgataggtcaccacttccttcatcaaatcttcaacggtaacttctttaccgccatgcgtgtcccaggtgtcgcggttatgacaatacaggcagcgcatcaggcagccctggaaaaaggtgataaagcgaatacctgggccgtctacggttccacaggattcaaaggagtgaatgcgaccaataacactcattgcggtgtttctccagatgtggcccatctgaggccgtgttggtgcgcagctcgaaggctacgtcgagtctgttttggcagtcaccttaaagtatagatagctgacaaaaaaggctctcgcgctaaaaaaggccccactttcgtggagcctttattgtacgctttttactgtacgatttcagtcaaatctaattacatagattgagtgaaggtacgagtaataacgtcctgctgctgttctttagtcaggctgttgaaacgtactgcgtagccagatacacggatggtcagctgcggatatttttccgggttttccatcgcgtcgagcagcatttcacggttcatcacgttaacgttcaggtgctgaccaccttcgatggatgcttcgtggtggaagtaaccatccatcagaccagccaggttggtcttacgaacttcgtcgtctttacccagtgcgttcggaacgatagagaaggtgtaggagataccatctttagcgtaagcaaacggcagtttagcaacggaagtcagagaggctactgcacctttctggtcacgaccgtgcatcgggttagcacccggtccgaacggcgcgccagcacgacgaccgtctggggtgttacccgttttcttaccatacacaacgttagaagtgatggtcagaacagactgagtcgggatagcgtcacggtaggtgtgcagtttctgaattttcttcatgaaacgttctaccaggtcaacagccaggtcatctacacgcggatcattgttaccaaactgcgggtattcgccttcgatttcgaagtcgatagccagaccgtcttcgtcacgaatcggtttaactttcgcatatttgattgcagacagggagtcagcagcaacggacagaccagcgataccacacgccatggtgcggataacgtcacggtcgtgcagcgccatcagagaggcttcgtagctgtacttgtcgtgcatgtagtggatgatgttcagtgcagtgatgtactgtttagccagccagtccatgaagtgatccatgcgctccatcacttcatcatagttcaggacatcgcctttgatcggttcagacttcggaccaacctgcattttcagtttttcgtcaacgccgccgttgattgcgtacagcatggttttcgccaggtttgcacgcgcaccgaagaactgcatttgtttaccaacgatcatcgggcttacgcagcaagcaatagcgtagtcatcgttgttgaagtccggacgcatcaggtcatcgttctcatactgcagagaagaggtgtcgatggacactttagcggcgaatttcttgaagttcagcggcagtttttcagaccacagaatggtcatgttcggttccggagacggacccatggtgtacagggtgttcaggaaacggaagctgtttttggtaaccagggtacgaccgtcgaggcccataccaccgatagattcggttgcccagatcgggtcgccagagaacagttcatcgtattccggagtacgcaggaagcgaaccatacgcagtttcatgaccaggtggtcaaccatttcctgcgcttcttgttcggtgatcttgccagctttcaggtcacgttcgatgtacacatccaggaaggtggaggtacgaccgaaggacattgcagcaccgttctgagacttaacagcagccaggtagccgaagtaagtccactggatagcttcctgagcgttggtagccggaccagagatgtcgtagccgtatttcgcagccatttctttcatctgacccagagcgcggtgctgttcagcgatttcttcgcgcagacggatagtctgttccaggtttacgccgttttccagatcagcctgcagagaagtgaactgtgccagtttgtctttcatcaggtagtcgataccgtacagcgcaacgcgacggtagtcaccgatgatacggccacggccatatgcatctggcagaccggtcagaacaccagatttacggcaacgcaggatgtccggagtgtaaacgtcgaacacgccctggttgtgagttttacggtattcagtgaagatttttttgatcatcggatccagttcgcggttgtacgctttgcaggaaccttcgatcattttgataccaccgaacgggataagagcacgtttcagcggagcttcagtctgcagaccaacgattttctcaagctgcttgttgatgtagccagcgtcgtgagaggtgatggtggaagcaacagcggtgtcaaagtcaactggcgcgtgagtgcggttttccagtttaacgccttccattactttgtcccacagggtggtggtcgcttcagtagcgccagccaggaaggactcgtcaccctcgtacggagtgtagtttttctgaatgaagtcacggacgtttacttcattctgccagtcacctttggtaaaaccttcccaggctgtggctaacttttcattaagctcggacatgtaacacctaccttcttaagtggattttttatttactgcgtacttcgacaaccattaatggtggtcgttttcacgcaggtaaatgacccagtatgtcaacccaaccaacaaaccaccaccgataatgttgccgatcgtaaccggaatcaggttatcagtgatgaaattcatcacggtcaggtgagaaaaattttccggtgcagaaccgactgcggtccaaaattccggggatgcgaagtcgcggattacaatacccatcgggatcataaacatgtttgcgatactgtgctcaaaaccgctggcaacaaacatcgcgaccggcagcaccataatgaacgctttgtccatcaggctgcggccagaataactcatccatactgccagacataccatcaggtttgccaggataccaagacagacggcctcaataaaagtatggtgcactttgtggtcggcggtttgtaggacgtttagtccccattgaccatttgcggtcatatactcgccggaaagccacattaaaagtacaaacagcagtgcgccgaccaggttgccaaaatagacatttagccagtttttcgccaactgaccccaggtgatgcgcccactcgccttagcaacaacaatcaacacggtggaagtaaagagatcggctccgcagacaacacaaagaatcagccccagagagaagcaaatgccgccaaccagttttgccatgccgaagggcattgtgcctgtgccagtggttgctgtgatatagaagacgaatgcgatactgatgaaaacaccggcggtaatcgccagatagaaagtcttaagcggatgtttcgttgctttatagacacccgcctcttcggccactttggccattgcagcaggaagtaaaagatcaaaagggttgtcagctttcacactaactctctctttattaagtcggcgacgagatactaacaaagcattatagatgagaaattgatatagatcatatctcgcctggcttataggcccgtaactcgcatggtttttatgcaaatacggagtaaatatttgattatccaaataaaaataaattttaaaaattaacaaatgagttgaattttttccgcatcctccgctaaaacagttaattaaaagggagcatcaggcgaataaagtaacaatatcgatcgtatttattaaatacaaattaccgatatttaaccttataattacaattattttattaatgcaaatatatgtaaagcggggcattaaaaaaacgccccgtaatataactcagactaatcattaagcctacattgcgtaggctatttgattttattttgcccagaatgctgctttggcgcgctgcagcttttcgtaggccttcaacaagctctgatgtgcagcaaacgcgtgcagatcgctatctaccggttgcaggccgtaaaacgccgcttcgccgctcattgccgcactggcggcttctacggcatctgcgccgtacatgcgaacaaacgcattcagatattgcagcggctggcgatcttcttcctgtgccagtaataacaacgtttgcaggcagcgataatagttggcgcgttccggactaaatacactactgttaaactccatcgtccattcggtccagaccagagcctgttccagatcgccaccagccagcgccagcatggcttttaattcaccgatacgcagggtgtaccaaccgttatcgctcccggtcgccagacccaacagctcacgcacgcgggtaaagtcatcaaaaccttcttcatccagttgctcgatgaggttcaggtaatcttctttttcccactcgctgcctggtaggctaagaatcgtttcacgtaaatggctgcccatactgttattcgcgagccacagatcttcagccggataaatatcggacatgccaggcacgataatacggcaagcataaacgcccagatgctcgtaatcggcaatataaacttctttatcttctttgttgaagatagccatcagtgtggcgaactcttcttccgtggtgccggagaaattccagtccacaaacggataatcggcatcctgcttgaacaggtcccaggagattaaaccgctggaatcgataaagtgcgtttcgaggttggtatgttcagcgacttcttcatcatcgaaggttggcggagtaaacacatccaaatctttcaggccacgaccttgcagcagctcggtcacggtacgttccagtgctacgccaaaatcaggatgcgcaccgaaagaggcaaagcaggtaccgttagcaggattgaacagtaccacgcaaatcaccggatactggccgccaaggctaccgtcataagcgaagattgggaaaccctccgcttccagcgtttcgatggcttcaactactgctgggtaacgcgccagcacgtctgccgggatctctggcaggctgatgctttcagcaataatgcggtttttcacgtagcgttcgaaaacttcagacaatccctgaacgcgtgcttcgttgcgggtattacctgcggacataccgttggagacgtacaggttaccaatgatattcatcggaatataaacggtctgattgtcggactgacgcgtaaacggcaggccgcaaataccacgatcttcgttaccggattgtaggtcaatcagcatgctgccggtcagttcattctccggatcataaaacgcgcgcagacggtcatcgagcagcccttctggcacatcgtcattttcggtcagtgggaaccatttttcgttgggataatgcacgaacggaccgttggcgatggtttcgcccagccagaagtccgcaaaaaagtagttggtactgagacgctcgaaatattcaccgagtgcagaagccagcgccgctttcttggttgcgcctttaccgttggtaaaacacagtgcgcactctttgtcgcgaatatgtacagaccagacgttaggcacgggattcagccaggaggcctcttcaatctgaaagccgaggtcactaagtttttgctggaagcgagcgatggaatcttccagagcggcatctttgccggggataaatgtttgcgtcatgaaaatcactttagtcgtacggaaagcgcgcaataatacgggttttatctcaaaggcgctatcaccgccgccatgccgatgaactgttgactatgcttttagcggataaaccacgttaagagcataaaaatgaaggcgttcgatctccaccgtatggcatttgataaagtgccttttgatttccttggcgaagttgcactacgtagtctttatacctttgtactggtctttttgttcctcaaaatgaccggaagacgcggtgtgcggcagatgagcctgtttgaagttttaatcattctgacgctgggaagtgcggcgggagatgtggcgttttatgatgatgtgccgatggtcccggtacttatcgtctttattactctggcgttgttataccgcctggtaatgtggttgatggcgcacagtgaaaaactggaagatcttctggaaggcaagccagttgtcattattgaagatggcgagctggcctggagcaaactcaataactccaacatgacggaatttgagttctttatggagctacgattgcgtggcgtggagcagctggggcaggtacgtctggcgattctcgaaaccaacgggcaaatcagtgtctatttctttgaagatgacaaggtgaaaccgggtttacttattttacccagtgattgtacgcagcgttacaaagtggtgccggagagcgcggactatgcctgtattcgttgtagtgaaatcattcatatgaaagcgggggaaaaacaattatgtccgcgctgtgcaaatccagaatggacgaaggcaagtcgggcaaaacgggtgacctgacagtaaaaacatcggctttttgctaataatccgagagattcttttgtgtgatgcaagccacatttttgccctcaacggttttactcattgcgatgtgtgtcactgaatgataaaaccgatagccacaggaataatgtattacctgtggtcgcaatcgattgaccgcgggttaatagcaacgcaacgtggtgaggggaaatggctcaaatcttcaattttagttctggtccggcaatgctaccggcagaggtgcttaaacaggctcaacaggaactgcgcgactggaacggtcttggtacgagcgtgatggaagtgagtcaccgtggcaaagagttcattcaggttgcagaggaagccgagaaggattttcgcgatcttcttaatgtcccctccaactacaaggtattattctgccatggcggtggtcgcggtcagtttgctgcggtaccgctgaatattctcggtgataaaaccaccgcagattatgttgatgccggttactgggcggcaagtgccattaaagaagcgaaaaaatactgcacgcctaatgtctttgacgccaaagtgactgttgatggtctgcgcgcggttaagccaatgcgtgaatggcaactctctgataatgctgcttatatgcattattgcccgaatgaaaccatcgatggtatcgccatcgacgaaacgccagacttcggcgcagatgtggtggtcgccgctgacttctctagtaccattctttcccgtccgattgacgtcagccgttatggtgtaatttacgctggcgcgcagaaaaatatcggcccggctggcctgacaatcgtcatcgttcgtgaagatttgctgggcaaagcgaatatcgcgtgtccgagcattctggattattccatcctcaacgataacggctccatgtttaacacgccgccgacatttgcctggtatctatctggtctggtctttaaatggctgaaagcgaacggcggtgtagctgaaatggataaaatcaatcagcaaaaagcagaactgctatatggggtgattgataacagcgatttctaccgcaatgacgtggcgaaagctaaccgtagccggatgaacgtgccgttccagttggcggacagtgcgcttgacaaattgttccttgaagagtcttttgctgctggccttcatgcactgaaaggtcaccgtgtggtcggcggaatgcgcgcttctatttataacgccatgccgctggaaggcgttaaagcgctgacagacttcatggttgagttcgaacgccgtcacggttaatgccgaaattttgcttaatccccacagccagcctgtggggtttttatttctgttgtagagagttgagttcatggaatccctgacgttacaacccatcgctcgtgtcgatggcactattaatctgcccggttccaagagcgtttctaaccgcgctttattgctggcggcattagcacacggcaaaacagtattaaccaatctgctggatagcgatgacgtgcgccatatgctgaatgcattaacagcgttaggggtaagctatacgcttagtgccgatcgtacgcgttgcgaaattatcggtaacggcggtccattacacgcagaaggtgccctggagttgttcctcggtaacgccggaacggcaatgcgtccgctggcggcagctctttgtctgggtagcaatgatattgtgctgaccggtgagccgcgtatgaaagaacgcccgattggtcatctggtggatgcgctgcgcctgggcggggcgaagatcacttacctggaacaagaaaattatccgccgttgcgtttacagggcggctttactggcggcaacgttgacgttgatggctccgtttccagccaattcctcaccgcactgttaatgactgcgcctcttgcgccggaagatacggtgattcgtattaaaggcgatctggtttctaaaccttatatcgacatcacactcaatctgatgaagacgtttggtgttgaaattgaaaatcagcactatcaacaatttgtcgtaaaaggcgggcagtcttatcagtctccgggtacttatttggtcgaaggcgatgcatctagcgcttcttactttctggcagcagcagcaatcaaaggcggcactgtaaaagtgaccggtattggacgtaacagtatgcagggtgatattcgctttgctgatgtgctggaaaaaatgggcgcgaccatttgctggggcgatgattatatttcctgcacgcgtggtgaactgaacgctattgatatggatatgaaccatattcctgatgcggcgatgaccattgccacggcggcgttatttgcaaaaggcaccaccacgctgcgcaatatctataactggcgtgttaaagagaccgatcgcctgtttgcgatggcaacagaactgcgtaaagtcggcgcggaagtggaagaggggcacgattacattcgtatcactcctccggaaaaactgaactttgccgagatcgcgacatacaatgatcaccggatggcgatgtgtttcagcctggtggcgttgagtgatacaccagtgacgattcttgatcccaaatgcacggccaaaacatttccggattatttcgagcagctggcgcggattagccaggcagcctgaatgaacaacgggcaataaatagccaaatctttctttatcaaaacgtcggcacattgtcggcgttttttttcggaccttgtgagtcattttgattaatggtagcgtcgcttgtcaatgtaagttgttgatacataatatttatatatgattaatcaacggatgattcacatgaagaatactaaattactgctggcgattgcgacctctgcagcattactgacagggtgtcaaaatacccacggtattgataccaatatggctatcagctccggtttaaatgcctataaagcagcaacattaagcgatgccgatgcaaaagcgattgccaatcagggctgtgccgaaatggacagcggcaatcaagtcgcaagtaaatccagcaagtacggtaaacgtctggcaaaaatcgccaaagcattgggtaacaatattaatggcacgccggtcaactataaggtttatatgaccagcgacgtcaacgcatgggcgatggcgaacggctgtgttcgtgtctacagtggcctgatggacatgatgaatgacaacgaaattgaaggcgttctgggccatgaactgggccacgtcgcgttgggtcacagcctggctgaaatgaaagcttcttatgcgatcgttgccgcacgcgatgccattagtgctaccagcggtgtggcttcccagctttcccgcagtcaattaggtgatatcgcagaaggcgctatcaatgctaaatactcccgtgataaagagtccgaagcagatgatttctcctttgatctgttgaagaaacgtggcatcagcacccaggggctggttggcagctttgaaacactggctagcctggatggcggtcgcacccagtccatgtttgactctcacccaccaagtacagagcgtgcgcaacacatccgtgatcgtatcgcctctggtaagtaaatcattgtcatctttcgggctggtcttctgccagcccgctataattgcgcaataaatccccatctgaatacagacaaaactggtttttgcacacaacgttaacgatttgtggcgtcggcgcgtataatgcgcgcggttatgttaacggtacgcctgttttaaggagataaagatgacggcaattgccccggttattaccattgatggcccaagcggtgcagggaaaggcaccttgtgtaaggctatggcggaagcgttgcaatggcatctgctggacagcggtgcaatttatcgcgtactggcattggcggcattacatcaccatgttgatgttgcgagcgaagatgcgctggtaccgctggcatcccatctggatgtacgttttgtgagcaccaatggcaatctggaagtgatcctcgaaggggaagatgtcagcggcgaaattcgtactcaggaagtggcgaatgcagctagtcaagtcgcggcattcccacgcgttcgtgaagcattattgcgtcgccaacgcgcgtttcgcgaattaccaggtctgattgccgatggccgcgacatgggaacggtggtattccctgatgcaccagtgaaaattttccttgacgcctccagcgaagaacgtgcgcatcgccgcatgctacagttgcaggagaagggctttagtgttaactttgagcgccttttggccgagatcaaagaacgcgacgaccgcgatcgtaaccgagcggtagcgccactggttccggcagccgatgctttagtgttggattccaccaccttaagcattgagcaagtgattgaaaaagcgctacaatacgcgcgccagaaattggctctcgcataagcgaccgaatttgcagtacccccgttgcaatggaatgacagcgggtatgttaaacaaccccatccggcatggagccaggtggacgttaaatataaacctgaagattaaacatgactgaatcttttgctcaactctttgaagagtccttaaaagaaatcgaaacccgcccgggttctatcgttcgtggcgttgttgttgctatcgacaaagacgtagtactggttgacgctggtctgaaatctgagtccgccatcccggctgagcagttcaaaaacgcccagggcgagctggaaatccaggtaggtgacgaagttgacgttgctctggacgcagtagaagacggcttcggtgaaactctgctgtcccgtgagaaagctaaacgtcacgaagcctggatcacgctggaaaaagcttacgaagatgctgaaactgttaccggtgttatcaacggcaaagttaagggcggcttcactgttgagctgaacggtattcgtgcgttcctgccaggttctctggtagacgttcgtccggtgcgtgacactctgcacctggaaggcaaagagcttgaatttaaagtaatcaagctggatcagaagcgcaacaacgttgttgtttctcgtcgtgccgttatcgaatccgaaaacagcgcagagcgcgatcagctgctggaaaacctgcaggaaggcatggaagttaaaggtatcgttaagaacctcactgactacggtgcattcgttgatctgggcggcgttgacggcctgctgcacatcactgacatggcctggaaacgcgttaagcatccgagcgaaatcgtcaacgtgggcgacgaaatcactgttaaagtgctgaagttcgaccgcgaacgtacccgtgtatccctgggcctgaaacagctgggcgaagatccgtgggtagctatcgctaaacgttatccggaaggtaccaaactgactggtcgcgtgaccaacctgaccgactacggctgcttcgttgaaatcgaagaaggcgttgaaggcctggtacacgtttccgaaatggactggaccaacaaaaacatccacccgtccaaagttgttaacgttggcgatgtagtggaagttatggttctggatatcgacgaagaacgtcgtcgtatctccctgggtctgaaacagtgcaaagctaacccgtggcagcagttcgcggaaacccacaacaagggcgaccgtgttgaaggtaaaatcaagtctatcactgacttcggtatcttcatcggcttggacggcggcatcgacggcctggttcacctgtctgacatctcctggaacgttgcaggcgaagaagcagttcgtgaatacaaaaaaggcgacgaaatcgctgcagttgttctgcaggttgacgcagaacgtgaacgtatctccctgggcgttaaacagctcgcagaagatccgttcaacaactgggttgctctgaacaagaaaggcgctatcgtaaccggtaaagtaactgcagttgacgctaaaggcgcaaccgtagaactggctgacggcgttgaaggttacctgcgtgcttctgaagcatcccgtgaccgcgttgaagacgctaccctggttctgagcgttggcgacgaagttgaagctaaattcaccggcgttgatcgtaaaaaccgcgcaatcagcctgtctgttcgtgcgaaagacgaagctgacgagaaagatgcaatcgcaactgttaacaaacaggaagatgcaaacttctccaacaacgcaatggctgaagctttcaaagcagctaaaggcgagtaattctctgactcttcgggatttttattccgaagtttgttgagtttacttgacagattgcaggtttcgtcctgtaatcaagcactaagggcggctacggccgcccttaatcaatgcagcaacagcagccgcttaatttgcctttaaggaaccggaggaatcatgaccaagagtgaattgatagaaagacttgccacccagcaaagccacattcccgccaagacggttgaagatgcagtaaaagagatgctggagcatatggccagcactcttgcgcagggcgagcgtattgaaatccgcggtttcggcagtttctctttgcactaccgcgcaccacgtaccggacgtaatccgaagactggcgataaagtagaactggaaggaaaatacgttcctcactttaaacttggtaaagaactgcgcgatcgcgccaatatttacggttaagttttttactcaaacttgaacgagagaaaagcacctgtcgggtgcttttttcatttctctaatctggaactggaagctgcctcgcagagttttgaacagttttcaccctttcgttaaattcttctgaatatgcctcggggaacgcaaaattcccaccagacaaccgctcaacaaagttgcacactttccataaacagggaggggtgcatgaaaataacgacagtcggtgtatgcataattagcggaatttttccgttgctgattttgccccaattgcctgggacattaacccttgcgtttctgactctcttcgcctgcgtactggcatttatccctgttaaaaccgtccgttatatcgcgctgacgttgctgtttttcgtttggggcatattaagtgcaaagcaaattttgtgggcaggagaaaccttaactggcgcgacgcaggatgcaattgttgagatcactgcaactgacggcatgaccactcattacggtcaaattactcatctacaaggtcgacgtatattccctgcgagtggtctcgtgatgtatggcgaatatcttccgcaagcggtttgtgctggacaacaatggagtatgaaactcaaagttcgtgcagttcatggccaacttaatgatggcggctttgatagccagcgttatgccattgcccagcatcagccgctcaccggccgttttctgcaggcaagtgtcattgaaccgaattgtagcctgcgtgcacagtatctggcgagtctacaaacaacgctgcaaccctatccgtggaatgcggttattcttggtttaggtatgggggaacggttatccgtccccaaagaaatcaaaaatatcatgcgcgatactggaacggcgcatttaatggcgataagcggattgcacatcgcttttgcggcgttgctggctgccggactcattcgcagtggacaaatttttctgcctgggcgctggatccactggcaaataccattaattggcggaatctgctgtgctgctttttatgcctggttgacgggaatgcaacctcctgcattgcgtaccatggtggcgcttgctacgtggggaatgcttaagttaagtgggcgacagtggagtggctgggatgtatggatatgttgtctggcggcaattttgctgatggatcctgttgccattctcagccaaagtttatggctctctgccgctgcggtcgcggcattgatattttggtatcagtggcttccctgtcctgagtggcaactgccgccggtattgcgtgcagttgtttccctcatccatctgcaactgggaatcacacttctgcttatgcccgtgcaaatcgtcatatttcatggcattagtctgaccagctttattgcaaatctattagcaattcccttggtgacatttatcacggttccgttgatcctcgccgcgatggttgtgcatttaagcgggccgttaatcctggagcaagggttatggtttcttgccgaccggtctttggctttacttttctgggggttaaagagtttgccggaagggtggatcaacattgctgaatgttggcaatggctaagtttttccccatggttcttactggtggtatggcgattaaacgcctggcgaacgttgccagcaatgtgtgtggctggaggcttgctgatgtgctggccgctgtggcaaaaacctcgacctgacgagtggcagctgtacatgcttgatgtcgggcaagggctggcaatggtgatagccagaaacggcaaagcgattctctatgacacaggactggcctggcctgaaggggatagtgggcaacaactgattatcccctggctccactggcataatcttgaaccggaaggcgttattctgagccatgaacatctggatcaccggggagggctggatagtatattgcatatatggccgatgttatggatcagaagtccgttaaactgggaacatcatcagccctgtgtgcgtggcgaagcgtggcaatggcaaggattgcgtttcagcgcgcactggcctttacaaggtagcaacgataaaggaaataaccattcctgtgtggttaaggttgatgacgggacgaatagcattcttctaaccggtgatattgaagccccagctgaacaaaagatgctaagccgttactggcagcaagtgcaggcaacattgcttcaggtacctcaccatggcagtaataccagtagtagcttgccattaattcagcgagtgaatggaaaagtggcactcgcaagcgcaagccgctataacgcatggcgactgccctctaacaaagttaagcatcgctatcaactgcaaggatatcaatggattgatactccacatcaaggtcaaacaacggtcaattttagtgcgcaaggctggcggattagcagcctcagggagcaaattttacctcgttggtatcatcagtggtttggcgtgccagtggataacgggtaaaatatgcggctatttcaacaaatgctggttttttgaatgcataacgacaaagatctctctacgtggcagacattccgccgactgtggccaaccattgcgcctttcaaagcgggtctgatcgtggcgggcgtagcgttaatcctcaacgcagccagcgataccttcatgttaagcctccttaagccacttcttgatgatggctttggtaaaacagatcgctccgtgctggtgtggatgccgctggtggtgatcgggctgatgattttacgtggtatcaccagctatgtctccagctactgtatctcctgggtaagtggaaaggtggtaatgaccatgcgtcgccgcctgtttggtcacatgatgggaatgccagttagtttctttgacaaacagagtacgggtacgctgttgagtcgtattacctacgattccgaacaggttgcttcttcttcttccggcgcactgattactgttgtgcgtgaaggtgcgagcatcatcggcctgttcatcatgatgttctattacagttggcaactgagcatcattttgattgtgctggcaccgattgttagcattgcgattcgcgttgtaagcaagcgttttcgcaacatcagtaaaaacatgcagaacaccatggggcaggtgaccaccagcgcagaacaaatgctgaagggccacaaagaagtattgattttcggtggtcaggaagtggaaacgaaacgctttgataaagtcagcaaccgaatgcgtcttcaggggatgaaaatggttagtgcctcttccatctctgatccgatcattcagctgatcgcctctttggcgctggcgtttgttctgtatgcggcgagcttcccaagtgtcatggatagcctgactgccggtacgattaccgttgttttctctagtatgattgcactgatgcgtccgctgaaaagcctgaccaacgttaacgcccagttccagcgcggtatggcggcttgtcagacgctgtttaccattctggacagtgagcaggagaaagatgaaggtaagcgcgtgatcgagcgtgcgactggcgacgtggaattccgcaatgtcacctttacttatccgggacgtgacgtacctgcattgcgtaacatcaacctgaaaattccggcagggaagacggttgctctggttggacgctctggtagcggtaaaagtaccatcgccagcctgatcacgcgtttttacgatattgatgaaggcgaaatcctgatggatggtcacgatctgcgcgagtataccctggcgagcttacgtaaccaggttgctctggtgagccagaatgtccatctgtttaacgatacggttgctaacaacattgcttacgcacggactgaacagtacagccgtgagcaaattgaagaagcggcgcgtatggcctacgccatggacttcatcaataagatggataacggtctcgatacagtgattggtgaaaacggcgtgctgctctctggcggtcagcgtcagcgtattgctatcgctcgagccttgttgcgtgatagcccgattctgattctggacgaagctaccagcgctctggataccgaatccgaacgtgcgattcaggcggcactggatgagttgcagaaaaaccgtacctctctggtgattgcccaccgcttgtctaccattgaaaaggcagacgaaatcgtggtcgtcgaggatggtgtcattgtggaacgcggtacgcataacgatttgcttgagcaccgcggcgtttacgcgcaacttcacaaaatgcagtttggccaatgatcgaaaaaatctggtctggtgaatcccctttgtggcggctattgctgccactctcctggttgtatggcctggtgagtggcgcgatccgtctttgctataaactaaaactgaagcgcgcctggcgtgcccccgtaccggttgtcgtggttggtaatctcaccgcaggcggcaacggaaaaaccccggtcgttgtctggctggtggaacagttgcaacagcgcggtattcgcgtgggggtcgtaagccggggatatggtggtaaggctgaatcttatccgctgttattgagcgcagataccacaacagcacaggcgggtgatgaacctgtgttgatttatcaacgcactgatgcgcctgttgcggtttctcccgttcgttctgatgcggtaaaagccattctggcgcaacaccctgatgtgcagatcatcgtaaccgacgacggtttacagcattaccgtctggcgcgtgatgtggaaattgtcgttattgatggtgtgcgtcgctttggcaatggctggtggttgccggcggggccaatgcgtgagcgagcggggcgcttaaagagcgttgatgcggtaatcgtcaacggcggtgtccctcgcagcggtgaaatccccatgcatctgctgccgggtcaggcggtgaatttacgtaccggtacgcgttgtgacgttgctcagcttgaacatgtagtggcgatggcggggattgggcatccgccgcgcttttttgccacgctgaagatgtgtggcgtacaaccggaaaaatgtgtaccgctggccgatcatcagtctttgaaccatgcggatgtcagtgcgttggtaagcgccgggcaaacgctggtaatgactgaaaaagatgcggtgaaatgccgggcctttgcagaagaaaattggtggtatttgcctgtagacgcacagcttagtggtgatgaaccagcgaaactgcttacgcaactaaccttgctggcttctggcaactaattacgccgcggcagcgttcgattgatggagtcatgaatgagcctgccgcacctctcccttgctgatgcgcgtaatcttcaccttgccgcacaaggcctgttaaacaaaccccgccgtcgagcgagcttggaggatattccggcaacgatctcccgcatgtccttgctgcaaatcgataccatcaatattgttgcccgtagtccatatctggtgcttttcagtcgtctgggaaattatcctgcccagtggctggatgagtctctggcgcgtggcgaattaatggaatactgggcgcatgaagcctgctttatgccgcgtagcgactttcgtcttattcgccaccgcatgctggcacctgaaaaaatgggctggaaatacaaagacgcctggatgcaggaacatgaggcggaaattgcacagttaattcagcatattcatgataaggggccggtacgtagtgccgattttgagcatcctcgtaaaggtgcaagcggctggtgggaatggaagccgcataaacggcatctggaaggtttatttactgccggaaaggtgatggtgattgaacggcgcaacttccagcgcgtttatgatttaacccaccgtgtcatgcctgactgggatgatgagcgcgatctcgttagccaaacagaagcagaaatcatcatgctggataacagtgcgcgtagcctgggaatattccgcgaacagtggctggcagattactatcggctgaaacgtccggcactggcggcgtggcgcgaagcgagggctgaacagcagcaaatcattgctgtgcatgttgaaaaattgggcaatctttggctgcatgatgatttgctgccgctactcgagcgagcgctggccggaaagctcactgcaacgcacagcgcggtacttagcccttttgatcctgttgtctgggatcgcaaacgcgcagagcagctttttgattttagctaccggctggagtgctataccccagcgccgaaacgccagtatggctattttgttctgccgttattacatcgtgggcaattagttgggcgaatggatgccaaaatgcatcgccagacaggcatccttgaagttatctctctgtggttacaggaaggtattaaaccaacgacaacgctgcaaaaagggctacgtcaggcgattactgatttcgctaactggcagcaggcaacgcgggtgacattaggatgctgcccgcaaggcctctttactgattgccgcaccggctgggaaatagaccccgtcgcataaatgattatgataagatttatgcattcataacccgatccatctggaggaactatggatcatcgtctgcttgaaatcattgcctgcccggtttgcaacggaaaactttggtataaccaggaaaaacaagagcttatttgcaaactggacaacctcgctttcccgctgcgtgatggcattccagtgttgctggaaacggaagcccgcgtgctgactgctgatgagagtaaaagttgatgtaaactgctgatgagagtaaatcatgagttttgtggtcattattcccgcgcgctacgcgtccacgcgtctgcccggtaaaccattggttgatattaacggcaaacccatgattgttcatgttcttgaacgcgcgcgtgaaagtggtgccgagcgcatcatcgtggcaaccgatcatgaggatgttgcccgcgccgttgaagccgctggcggtgaagtatgtatgacgcgcgccgatcatcagagtggaacagaacgtctggcggaagttgtcgaaaaatgcgcattcagcgacgacacggtgatcgttaatgtgcagggtgatgaaccgatgatccctgcgacaatcattcgtcaggttgctgataacctcgctcagcgtcaggtgggtatggcgactctggcggtgccaatccacaatgcggaagaagcgtttaacccgaatgcggtgaaagtggttctcgacgctgaagggtatgcactgtacttctctcgcgccaccattccttgggatcgtgatcgttttgcagaaggccttgaaaccgttggcgataacttcctgcgtcatcttggtatttatggctaccgtgcaggctttatccgtcgttacgtcaactggcagccaagtccgttagaacacatcgaaatgttagagcagcttcgtgttctgtggtacggcgaaaaaatccatgttgctgttgctcaggaagttcctggcacaggtgtggatacccctgaagatcttgagcgcgttcgcgctgaaatgcgctaatttcacttcacgacacttcagccaattttgggaggagtgtcgtaccgttacgattttcctcaatttttcttttcaacaattgatctcattcaggtgacatcttttatattggcgctcattatgaaagcagtagcttttatgagggtaatctgaatggaacagctgcgtgccgaattaagccatttactgggcgaaaaactcagtcgtattgagtgcgtcaatgaaaaagcggatacggcgttgtgggctttgtatgacagccagggaaacccaatgccgttaatggcaagaagctttagtacgcccggaaaagcccgacaactggcatggaaaaccaccatgctggcaagaagtgggactgtccgtatgccgactatttatggtgtgatgacgcatgaagaacaccccggccccgatgtcctgctactggagcggatgcgtggtgttagcgtggaggcaccagcccgaacaccagaacgctgggaacaactcaaagaccaaatcgttgaagccttactggcctggcaccgtcaggacagtcgcggttgcgtcggcgcggtcgacaatactcaggaaaatttctggcccagttggtaccggcaacatgttgaagtgctatggaccacgctcaatcagttcaataacaccggtctgacgatgcaggataagcggatcctgtttcgcactcgcgaatgtctcccggcattatttgaaggctttaacgacaattgtgtgctgattcacggtaacttctgtttacgcagcatgttgaaagatagccgcagcgatcagttactggcgatggtcgggccgggactaatgctttgggcaccgcgagaatacgaactgttccgactaatggataattctctggcggaagatttgctctggagttacctgcaacgcgcgccagtggcggagagcttcatctggcggcgttggttgtatgtgttatgggatgaagttgcgcaactggttaataccggacgatttagtcggcgcaacttcgatctggcaagtaaaagtctcttgccgtggctcgcctgatcactcttgccgtggctcgccactgctaccttttagccactgccagatacggccaagcgtttcatagccaacacgatcgctatgcatcaaccagaccggagaagggattgcccgttcccacgggttaagcgggctgtcgatggccaactgattcgccggggctggtagcggatttaacccttcctgctgaaaaaagatcatcgcccgcggcagatgacttgcggaggtcaccagcaggaaaggggcgtcaccaatcgcctgtttcactgctgcagcttcttcttcggtatcttttggcaaatccagggtgataatttgctcgcgcggcacgcccaggctttgcgcaactctggcacctacttccgctgtactcaccgtattggtttttgctacgcctcccgtgaagatcagtttacttcccggattttcgcgccataagcgaataccttcattcaggcgtggcagactgttattgattaaattagagctcggtgcccactgcgggttccaggtataaccacctccgagcaccacgatatagtccactttttggctattattccatgtcggataggtgctttcgatgggacgcagcaggcggtcggctaccggttgcaaactcaataacaagagcgccagccacccaatgctaataaaaatcttcccggttttttgaaaacggctaaaccacagcagcgccaggccagcgccaataatcaacaacatcagcggaagtggcagcaacatattgccaatcacttttttcagtgtaaaaagcatcctttctggttccttttttaaccatatagcaagggatcgccagcgatattacaccagacgggttcattctcgccgtggctgtgacaaaatagcgtctttatcagaaaacgtcttagccaaccggtggagaaagcaatgcaggatcgcaattttgatgatattgcggaaaagttttcccgtaacatttacggcaccaccaaagggcagcttcgacaggctattctgtggcaggatctcgatcgcgtgctggcggaaatgggcccgcaaaaactgcgtgtgctggatgctggcggtggagaagggcagaccgcaatcaaaatggccgagcgtgggcatcaggtcattttatgcgatctttctgcgcagatgatcgaccgcgcaaaacaggcggcagaagcaaaaggtgtgagcgacaacatgcaatttatacattgcgccgctcaggatgttgctagccatttggaaacgcccgttgatctgatattgttccatgcggtgctcgagtgggtggctgatccccgcagcgtattgcagaccctctggagtgtgttgcgtccaggcggcgtgttgagcttaatgttctacaatgcgcatggtttgttgatgcataacatggtcgccgggaattttgattacgtgcaggcgggaatgccgaaaaagaaaaaacggacgcttagcccagattatccacgcgacccggcgcaggtttatctgtggctggaagaagctggttggcaaattatgggtaagacaggcgttcgcgtgtttcatgattatctgcgcgagaaacaccagcagcgcgactgctatgaagcattacttgaattagaaacgcgttattgccgtcaggaaccgtatattaccctggggcgttatattcatgtcaccgcgcgcaaaccgcagagcaaggataaagtatgagtgaattttcccagacagtccccgaactggttgcctgggccagaaaaaatgacttctccatcagcctgccggtagaccgactctcttttctgctggcggttgccacgctgaacggcgagcgtctggatggtgagatgagtgaaggcgagctggtggatgcattccgccatgtgagtgatgcgtttgagcaaaccagcgaaaccatcggcgtgcgcgccaataacgcgatcaacgacatggtgcgtcaacgtctgctgaaccgctttaccagcgagcaggcggaagggaacgcaatttaccgtctgacgccgctcggcatcggcattactgactactacatccgtcagcgcgagttttctacgctgcgtctttctatgcagttgagcattgtggcgggtgagctcaaacgcgcagcagatgccgccgaagagggcggtgatgaatttcactggcaccgtaatgtctatgcgccactgaaatatagcgtagcagaaattttcgacagtatcgacctgacgcaacgtctgatggacgaacagcagcagcaggtgaaggacgatatcgcccagttgctgaacaaagactggcgggcggcgatttccagctgtgaattgttgcttagcgaaacttccggaacgctgcgtgaattgcaggatacgctggaagcggcaggcgacaaattgcaggctaatctgttgcgcattcaggatgcgacgatgacccatgacgatctgcatttcgtcgatcgtctggtgttcgatctgcagagcaaactcgatcgtattatcagttggggccagcaatccatcgacttgtggattggctacgaccgccacgtacacaaatttattcgtaccgcgatcgatatggataaaaaccgcgtctttgctcagcggttacgtcagagcgtacaaacctattttgatgagccgtgggcgctaacttatgccaatgccgatcgtctgctggatatgcgtgacgaagagatggcactgcgcgatgaagaagtgactggggaacttcctgaggatctggaatacgaagagtttaacgagatccgcgaacagctggcggcgatcatcgaagaacaacttgccgtgtacaaaaccagacaagtgccgctggatcttggtctggtggtacgcgaatatctgagtcagtatccgcgtgcacgtcactttgacgttgcgcgtattgttattgatcaggcggtacgtcttggcgtagcgcaagcagatttcaccggactgccagcgaaatggcagccgattaatgattacggagccaaggtacaggcgcatgtcatcgacaaatattgaacaagtgatgccggttaagctggcgcaggcgctggcgaatccgttatttccggcgctggacagcgccttacgtagtggacgccatattggcctcgacgaactggataatcatgcattcctgatggattttcaggaatatctggaagagttttacgcgcgttataacgttgagcttattcgcgcaccagaagggttcttctatttacgcccacgttccaccacgctgatccctcgttccgtcttgagcgaactggatatgatggtcgggaaaatcctctgttatctctatctcagcccggaacggctggcgaatgaggggattttcacccagcaggaactgtacgacgaactgctcaccctggccgatgaagcaaaactgctgaaactggtgaacaaccgtagtaccggtagtgacgttgaccgtcagaagttgcaggagaaagtacgttctagcctcaaccgtctgcgtcgtttaggcatggtgtggtttatgggccacgacagcagcaagtttcgcattaccgaaagcgtgttccgcttcggagccgatgtgcgtgctggcgacgatccccgtgaagcacagcgtcgcctgattcgtgatggcgaagcaatgccgattgaaaatcatctgcaactcaacgatgaaaccgaagagaatcagccagatagcggagaggaagaataatgattgaacgcggtaaatttcgcagtctgacgctgattaactggaacggcttttttgcccgaacttttgaccttgacgagctggtcacgacgctttctggcggtaacggggcgggtaaatccaccaccatggcggcgttcgttacggcgctgatccccgacctgaccctgctgcatttccgtaacactacggaagccggggccaccagcggtagccgcgataaaggtctgcacggtaagctgaaagcgggtgtctgttatagcatgctcgacaccattaacagccgccaccagcgcgtggtggtcggtgtgcgtctgcaacaggttgccggacgcgatcgtaaagtggatatcaagccgtttgccattcagggactgccgatgagcgtgcagccgacacagctggtgaccgaaaccctgaacgaacgccaggcgcgcgtgctgccgcttaacgagctgaaagacaagctcgaggcgatggaaggcgtgcagtttaaacagttcaactccattactgattaccacagcctgatgttcgatctgggcatcatcgcgcgtcgtctgcgctccgcatctgaccgtagcaaattctatcgtctgatcgaagctagcctgtatggcgggatctccagtgccattacccgttctctgcgcgactacctgttgccagaaaacagcggcgtgcgtaaagcgttccaggacatggaagcggcgctgcgtgaaaaccgtatgacgctggaagcgattcgtgtcacccagagcgaccgcgacctgtttaagcatctgatcagcgaagccaccaactacgtggcggcggactacatgcgtcacgccaacgagcgccgtgtccatctcgacaaagccctggagtttcgtcgcgagctacatactagccgtcagcaactggcggctgagcagtacaaacacgtcgatatggcgcgtgagctggcagagcacaacggtgccgaaggcgatctggaagcggattatcaggcggccagtgatcacctgaacctggtgcaaaccgcactgcgtcagcaggagaagatcgaacgctacgaagcggatctcgatgagctgcagatccgtctggaagagcaaaatgaagtggtggcagaagccatcgaacgccagcaagagaatgaggctcgtgcggaagctgccgaactggaagtggacgagctgaaaagccagcttgctgactaccagcaggcgctggacgtccagcaaacgcgcgcgatccagtataaccaggcgattgctgcgcttaatcgtgccaaagaactgtgccatctgccggacttaaccgccgactgcgccgccgaatggctggaaaccttccaggcgaaagagctggaagcgactgaaaaaatgctctctcttgagcagaaaatgagcatggcgcaaaccgcgcacagccagtttgagcaggcttatcagctggtggtggcaatcaacggcccactggcgcgtaacgaggcgtgggatgtcgctcgcgaactattgcgcgaaggggtcgatcagcgtcacctggcagagcaggttcagccgctgcggatgcgattaagcgaactggaacagcgtctacgcgagcagcaagaagctgagcgtctgctggcagatttctgcaaacgtcagggcaagaattttgatatcgacgaactggaagccctgcatcaggaactggaagcacgcattgcctctctttccgatagcgtgtctaacgcccgtgaagagcgcatggcactgcgccaggagcaggaacagctgcagtctcgcattcagagtttgatgcagcgtgcgccggtttggctggcagcgcaaaacagtctcaaccagttgagcgaacagtgcggcgaagagtttacctccagccaggacgtcaccgaatatctgcaacagttgctggagcgtgagcgagaggcgattgttgaacgcgatgaagtgggcgcgcgcaaaaacgccgtcgatgaagagatcgaacgtttaagccagcctggcggctctgaagatcagcgtctgaacgcgctggcggagcgttttggtggtgtgctgctgagtgaaatttatgacgacgttagcctggaagatgcgccgtacttcagtgcgctgtatggcccgagtcgccacgccatcgtggtgccagatctgagtcaggtaactgaacacctggaaggcttgaccgattgcccggaagatctctatctgatcgaaggagatccgcagagtttcgatgacagcgtgttcagcgttgatgagctggaaaaagcggtagtggtgaaaatcgccgatcgtcagtggcgttatagtcgtttcccggaagtgccgctgtttggtcgtgctgcgcgtgaaagccgtattgaaagcctccatgccgagcgtgaagtgctttccgaacgcttcgccacgctctcctttgatgtacagaaaactcagcgtctgcatcaggcgttcagccgctttatcggcagtcatctggcggttgcgtttgagtctgacccggaagcagaaatccgtcaactgaacagccgtcgcgtcgaactggagcgggcgttaagtaatcatgaaaatgataaccagcagcagcgtattcagtttgagcaggcgaaagagggcgttacggcgctgaaccgcattctgccgcgtctcaacctgttggctgatgacagcctggcggatcgcgtcgatgaaatccgcgaacgtctggatgaagcccaggaagccgcgcgttttgttcagcagtttggcaatcaactggcgaaactggaaccgattgttagcgtattgcagagcgacccggaacagttcgaacagttaaaagaagattacgcgtactctcagcagatgcagcgcgatgcccgtcagcaggcgtttgccctgacggaagtggtgcagcgtcgtgcgcactttagctattctgacagcgcagaaatgcttagcggtaacagcgatctcaacgaaaaactgcgtgaacgtctggaacaggcggaagcggagcgtacccgcgctcgcgaagcgttgcgcggtcacgcagcgcagttgagtcagtacaaccaggtgctggctagcctgaaaagttcttacgacaccaaaaaagagctactcaacgatctgcaacgtgaattgcaggatatcggcgtgcgtgctgatagcggggcagaagagcgggcgcgtattcgccgtgacgagctgcatgcgcaactgagcaataaccgtagtcgccgcaatcaactggaaaaagcgcttaccttctgcgaagcggagatggacaacctgacccgcaaactgcgcaagctggagcgggattactttgagatgcgcgagcaggtagtgaccgccaaagcgggctggtgtgcggtgatgcgcatggtgaaagataacggcgttgagcgccgcttacaccgtcgtgagctggcttatctctccgctgatgatttgcgttccatgagcgataaggcgttaggtgcgctgcgtctggcggtggcggataacgaacatctgcgcgacgtgctgcgcatgagcgaagatccgaaacgtccggagcgtaaaattcagttcttcgtggcggtttatcagcatctgcgtgaacgtattcgtcaggatattattcgtaccgatgatccggtggaagctatcgaacagatggagattgaacttagccgtctgaccgaagaattaacctcccgtgaacagaaactggcgatcagttcccgcagcgtggcgaacatcattcgcaaaaccattcagcgcgagcagaaccgtatccgtatgctcaaccaggggttgcagaacgtaagctttggtcaggtgaacagcgtgcgtctcaacgtgaacgtgcgtgaaacgcacgccatgctactggatgtgctctctgaacagcacgagcagcatcaggatctgtttaacagcaaccgtttgaccttcagcgaagcgctggcgaaactgtatcaacgtcttaacccgcagattgatatggggcagcgcacgccgcagaccatcggtgaagaactgctggattaccgcaactatctggaaatggaagttgaggttaaccgtggttccgatggctggctgcgcgcagagtctggtgcattgagcaccggtgaggcgattggtaccggtatgagcattctggtgatggtggtacaaagctgggaagatgaatctcgccgcctgcgcggtaaagatatctctccttgccgcctgctgttcctcgatgaagcagcgcgactggatgctcgttctatcgccacgctgtttgaattgtgtgagcgtttgcaaatgcaactcatcatcgcagcgccggaaaatatcagcccggagaaaggcaccacctataaactggtgcgtaaagtcttccagaataccgaacacgttcatgtcgtcggcctgcgaggatttgcgccgcaactccctgaaacgcttccaggaactgacgaagcgccttctcaggcgagttaaaattaaggcggcagcaatgccgccttttctttttccgaaaactccgtttctgcactaaaaaagtggcacattacggcgcgcttttctttaaacttctttacattaggttatgtaaaaacgtatcggcgtttatatactgaagataagcctgatgagtaacaggcttgctcgtcatactttcgtgagtattggcgttgtacaggcaagtcgtaaaataacagcctggctattcagagtatgataaaaacagggggcaagggatgttgcttaatatgatgtgtggtcgtcagctgagcgcaatcagtttgtgcctggccgtaacattcgctccactgttcaatgcgcaggccgatgagcctgaagtaatccctggcgacagcccggtggctgtcagtgaacagggcgaggcactgccgcaggcgcaagccacggcaataatggcggggatccagccattgcctgaaggtgcggcagaaaaagcccgcacgcaaatcgaatctcaattacccgcaggttacaagccggtttatcttaaccagcttcaactgttgtatgccgcacgcgatatgcaacccatgtgggaaaaccgtgatgctgttaaagccttccagcaacagctggcagaggtggcgattgccggtttccagccgcagtttaataaatgggtagagttactgaccgatcctggtgttaacgggatggcacgcgacgtggtgctctctgatgcgatgatgggctatctccatttcattgcaaatattccggtcaaaggcactcgctggctatatagcagtaaaccttatgcacttgcaacgccgccgctcagcgtgattaaccaatggcagctggcgctggataaaggtcaattgcctacgtttgttgcaggactggcaccgcagcatccgcaatatgcggcgatgcatgaaagcttactggccttactctgtgacaccaaaccgtggccccaactgaccggcaaagcaacgttgcgcccagggcagtggagtaacgacgtaccggcgttgcgcgaaatattgcaacgcacaggcatgttggacggggggccgaaaattactctacctggcgatgacacgccaactgacgcggtagtcagcccatccgctgttactgttgaaacagcagaaactaagccgatggataagcaaacgacgtctcgtagtaaacctgcgcctgccgttcgcgccgcctacgataatgaactggtggaagccgttaaacgttttcaggcatggcaaggattgggggcagatggtgctattggcccggcaacacgtgactggttaaacgtaacgcccgcccagcgtgctggtgtgttggctctcaacatccagcgattgcgcttgctgccaacagagctttctaccgggatcatggttaacattccggcctatagcctggtctactatcagaacggcaatcaggtgctggatagccgagtcattgtcggtcgccccgatcgcaaaacgccgatgatgagcagtgcccttaacaacgtagtggtaaacccgccgtggaacgtacctccaactctggcacgcaaagatattctgccaaaagtgcgcaacgatccgggatatctcgaaagccatggctatacggtgatgcgcggctggaacagcagagaagcgattgacccatggcaggttgactggtctacaatcacggccagcaatttaccgttccgcttccagcaggctccaggcccacggaacagcctggggcgctataaattcaatatgccgagtagtgaggccatttatttgcatgacacgccgaaccacaatctgttcaagcgtgatacacgcgcattgagcagtggctgtgtacgagtgaataaagcttccgatctggcgaatatgctgttgcaggatgcaggctggaatgacaaacgtatttctgatgcgctgaagcagggtgatacacgttacgtcaatattcggcagagcattccggtgaatctctactacctgacggcctttgttggtgcagatggtcgtacccagtatcgtacagatatttacaattatgatctgcctgcgcgatccagcagccaaatcgtaagcaaagcggaacaattaatcaggtaaatgaagtagttcggggaaatcagttgtcgtaataattagcatgattgggggcgattctctgcagcccccgtcactgctggggttgagtcatcttgacgtctgctttacgggcggttaaggtgcctcttgtgcgccagaagtgcatataaacgataacattgacctgtagacttgattatcatggacaaattcgacgctaatcgccgcaaattgctggcgcttggtggcgttgcactcggtgccgccatcctgccgacccctgcgtttgcaacactctctaccccacgcccgcgcattttgacactcaataatcttcataccggagagagtatcaaagcggagtttttcgatggcagaggctatattcaggaagaattggcaaaacttaaccattttttccgcgattaccgcgcgaacaaaataaagtccatcgacccaggattattcgaccagttgtatcgcctgcaagggttgttaggcacgcgcaaaccggtgcaactcatttccggttatcgttctattgataccaacaatgaactacgcgcccgcagccgtggagtagcgaagaaaagctatcacactaaaggccaggcgatggatttccatattgaaggtatcgcgttaagcaatattcgcaaagccgcgttatctatgcgcgcaggtggtgtaggatattatccacgtagtaactttgtgcatattgataccgggccagcacggcactggtaataattgcttaacgaaacaggggcagtatgaactatcgtattattccggtcaccgcattctcccagaactgtagtttaatctggtgtgaacaaacccgtctggccgcactggtcgatcctggcggcgatgcggaaaaaatcaaacaggaagttgatgacagcggcctgacactgatgcagatcctgctgacgcatggtcatctggaccacgttggcgcagcggcggaactggcgcaacattacggcgtgccggttttcggcccggaaaaagaagatgagttctggctgcaaggcttgcctgcgcaaagtcgtatgtttggtctggaagagtgccagccgctgacgccagatcgttggctgaacgaaggcgataccatcagcatagggaatgtgactttacaggtgttacattgccctgggcatacgccgggtcatgtcgtgttttttgatgatcgggcaaagctgctgatttctggcgatgttattttcaaaggcggagtagggcgcagtgacttcccgcgtggcgatcataatcaactgatttctagtatcaaagataaattgctgccactgggggatgacgtgatatttattccgggtcacggaccattatccacacttggttatgaacgcctgcataatcccttcctgcaagacgaaatgcccgtctggtaaggcacataaaaaagcccgcttttaatgctggcctggatttctggcaaagtgcgctttgtttatgccggatgcggcacgagcgccttatccggcctacaaaatcgtgcaaattcaaaatattgcaggggacgcgtaggcctgataagcgtagcgcatcaggcaatgttgcgtttgtcatcagtctcagcccgcttttcagcgggcttcattgtttttaatgcttacagcactgccacaatcgcttcgcacagcggagccatgttatctggtgtcatcccggccacatttacgcgaccagaagcaaccgcatatacgccaaactcttcgcgcagacgcagcacttgttcttttgtcaggccactgaaggagaacatgccgttctgtttgatgataaagctgaagtcgcggtttgcgcctttttcctgcagcgtattgacgaacaactgacgcatacgctgaatacgctggcgcatatcagtcagctcttgttcccaaatcgcacgtaacgcatcgttgctcaggatggtggcaacaacagaagcgccgtgtgctggtgggttagagtagttagcgcgaatcgccgctttcatttggctgaatgcgcgatcaacggtttcactgtcggcagcaaccagagtacaagcgccaacacgctcgttgtacaggccaaagtttttagagtaggaactggcaacaatcagctctttatgcatagccgcgaaagcgcgcagtccttcagcatcttcttccagaccacgggcaaaaccctggtaagcgaagtcaaacagcggtaaccagcctttctcaacggagagttgtgccagtgtttgccattgttccagcgtagggtcgataccggttgggttatggcagcagccatggaacagcactacgtcgccagcctgagcttcattcaggctgttaatcagtgcatcgaagtcaagagtgtgattttccgcatcataataagcgtattcacgaacttccagacctgcagagttaaagacgctcttatggttcggccagcttgggttgctcacccacacacgcttaacgctggtattttttgccaggaaatcggcagccacgcgtagtgcgccagtgccccccggagtctgtgccgtgcgagcacgtttgtcattgatcagggcgctacctttaccaaacagcagttcctgagtgcagcgaccaaattcagggatgccgtcaatgccgaggtaatttttggtggtttcattttcgagcagatactgttcagcctttttcacgctggtcagtaccggggttttgcccgtctcatctttatagacaccaatcccgaggttaattttgccgggacgttcatcggcacgaaacagatcggccaggcccagaatcgggtcggcaggagcggcggtaatgttctcaaacatgacgaggttccattatggttacagaagggaagtccgctatcagggtaacgggagatttacaaaattccaactattactgatgaaaacgcaggctgtttttgcaagacgtgagattgctctggaaggtataaaaaaaacaggaccaaagtcctgttttttcggcatttaacaaagaggtgtgctattagaactggtaaacgatacccacagcaacggtgtcgtcactacctacgcccagtttgttgtcagaatcgatctggttgatgatgtagtcaacataggtggacatgtttttgttgaagtagtaggttgcgcccacttcaaagtagttcaccagatcaacatcaccgataccttctacgtctttcgctttagatttggtgtaagcgatggacggacgcagaccgaaatcgaactggtattgcgcaactaacagaacgtcttgcgttttgttggcgaagccgctggtgtttgtaaatttattagtgatcggcgtagcgttacgggtttcaccgtagttcgctgccaggtagatgttgttcgcgtcgtacttcagaccagtagcccactgttcagcttttttaccgttgccaagaggttgagcttcttgcaggttggtacggtcagctgcaccataagcaccaacgataccaaagccttcgtattcgtagctgatagaaccgccaacaccgtcgccgttagaacggcgtgcagtgtcacgctcgtttttacccaggtactgaacagcgaagttcaggccatcaaccagaccaaagaagttggagttacgataggtagcaacgccgccaacacgaccaacgaagaagtcatcgctgtatgcagtatcaccaccaaattctggcagcatatcggtgtaacccagtgcatcataaaccacaccgtagttacggccgtaatcgaaagaaccaacgtcagcgtatttaagacccgcgaatgccagacgcgttttgttaccagtttgagcgtcagcgccttcagagttgttaccctggaagttatattcccactgaccataaccggtcagatcggaattgatttgagtttcccctttaaaaccaagacgggcataggtcatgtcgccattgccaccgtaactgttttcaccgttacccttggaaaaataatgcagaccaacagctttaccgtacagatctactttgttgccatctttgttatagatttctgcagcgtttgcagtacctgctactaacagagcagggacgatcactgccagaatattgcgcttcatcattatttattaccctcatggttttttttatgacacctgccactgccgtcaataagttctgtcaataaaaatttacggaactattgatgagagtttggtgtctttatgtgtctgcaggcatctttccattcaaactaacgtttcgctaccgtgaaagtgctacaaagataaagatttggtttcaaaaagaaaaaatatgtaaccaaaagtaaaatttaaggaactttgtgaacaccgtcatatttccatagagacgtgatgatatttacagcaattttaatctatttatatgatttccttatatttaaattaactaaacggaaattttgtttctgatggaaactttatcgacctggcacaaaatcttctttcagacatccagaatgccaaaaaatagtatgaaaattgtgctattagctaagaaaaaactaatccgcaataagaatgcggattagtttttgcgcgtaaatgttgcaatgtaatattccgtaacaggatgatcgttatggcggggttgcaaatagattgcttgacttaacaaacagataacttgacagaaaagataaaaaaagagccagcgggcgctggctcttgaagacgctaaattagaagctggcgttacgcggagtacgtgggaacggaatcacatcacgtacgttttgcacgccagttacgtaagcaatcagacgttcaaaaccaagaccgaaaccactatgcggaacagtaccgtagcgacgcagatcgcgataccaccagtaatcttctttattcaggcccatttccagcatacgctcgtccagcacgtccagacgttcttcacgctgggagccaccaatgatctcaccgatgcccggagccagaacgtccatagccgcaacggttttaccgtcttcgttaaggcgcatatagaacgctttaatatctttcggatagtttttaaccactaccggtgctttaaagtgttcttccgccagataacgctcatgctcagaagagagatcgactccccagtaaaccgggttttcaaacttcctgccgcagttttcgagaatggtcactgcgtcggtataatccacctgcgcaaaatcggcttcaatgaagcgttccagacgactaacggcatctttatctacgcgttcagcgaagaatttcatgtcgtcagcgcgttcttcgagaaccgctttgaagacatatttcagcatggcttcagccagacccgcaatatcgttcaggttagcaaacgccacttccggctccagcatccagaattccgccaggtgacggctggtgttggagttttcagcacggaaagtcgggccgaaggtataaattttggacaatgcgcaagcgtaggtttcgccgttcaactggccagatacggtcaggaaagactctttaccaaagaagtctttgtcgaaatccactttgccctgatcgttacgcggcaggttttccagatccagcgtagaaacgcggaacatttcgcctgcaccttcggtatcagatgcggtaatcagactcgtactaacccagaagaatccctgctcgttaaagaagcgatgcagcgcctgcgccagcgtatggcgaacgcgcgcgacggcaccaatcaggtttgtgcgcggacgcaggtgagcgacttcacgcagatactcaatgctgtggcgttttgccgccatcgggtaagtgtctggatcttcaacccaaccagcaacttcaaccttgctggcctgaatttcaaattgttgcccctggcccgggctcgccacgactttacccgtcacaatgacgctgcagccggtggtcagacgcaggacgtcttcattgtaattgggcagagaattattgatgacagcctgtacaggatcaaagcaggaaccgtcataaacggcgaggaaggagatgccagctttactatctcggcgggtacgtacccatccgcgcacggtgacttcgctgtcaacggctacacggccctggagtacgtcggctacaggcacaacgctcataatattctctctgttaatagtcggaaaaataaacacttgtccacccgtaaatggggggatacctatgttacctggcatctgcaatcagacaagcagaattcgcaaatgcagcgaaagatttcggaattaaaggtaaaaaaagggagccgattagctccctgatgatattaactggcttttttaatatgcggaaggtcgaacgctttgcgcagcgcccgaacaaacgctttatcatggcagatagttttgccagggctgtcagaaagtttcgccaccggtttaccgttacactctaccaacttaatgacaatattcaggggttttacctgggggatatcgcaggtcaggcgagtcccaataccaaaacttaattgcacgcgggaagagaagtggcggtatagctcaaccgctttgcgtaaatccagattgtcagagaaaaccagcgttttactctgtggatcaattcccagcttttcataatgtgcaatggctttttcaccccattcaaccgggtcgccagagtcatgacgcaggccctgataccgactagcgaactcgacaccgaaatcacgcaggaaagcatccatagtgatgcagtcggttaatgcaatgccaagttggtcgggatactcttccagccaggcagcaagtgcagctcgctggctgttggctagatccgggctgatttgctgatgtgcctggaaccattcgtgtgcctgtgttcccatcggcgtgagggaaagccgacgcgccagatcgtagttgctggtgcccacaaaccaggattcctgttgcagacgcttaacgatggtttcttgtacttcgcgagaaaaacggcgacgggtgccaaaatccatcagatggaagcggctcatatcaagaccggcggttaacgcgctgaagtcgactaatttgctttccagcgtgtcgagggcttgcgcaacgtcggcctgcggactgcgatagcgatgtaccatttcactgataaccgccagcaaaggaacttcccagaggatgacttcacgccacgggccgcttaaacgaatatccagcttgccattatcgttggacacggtgacttgttccgggttaaagcggaactcgcgtaaccagttaagatagtcggccttaaagaaaggcagggcagaaagccactgatattcatcatcctgcaggcgcaggtgctgcatcgcctgaacctgttcacgaatagcatcggcataaatacccagcagatcgtcacctcggcaacgaaactccgccgcgacatgcacatcgtaatagtgatgaaacacggcttgctgcatatgcaacttataagcatctgtatccagcaagctgtgcagaacaggagaagcgaattgtgtcataggtgcgcagtagcgtcctcgtacaggagcgtttagtacaataaacatcttcaggaactgctggagtataccttgtttcgcaatttattgaaccccgatcacaccatatgccacctttctggtcgatggcattacgcggtgtatgttataaaaatgtagcaataaaggcgtttgtacctgaaaagatgaagattctgcatagcgcgatttacgcaacaggaatagactgaacaccagactctataaaagatgctaaaggttatttatgactcaacagccacaagccaaataccgtcacgattatcgtgcgccggattaccagattactgatattgacttgacctttgacctcgacgcgcaaaagacggtcgttaccgcggtcagccaggctgtccgtcatggtgcaagtgatgctccccttcgtctcaacggcgaagacctcaaactggtttctgttcatattaatgatgagccgtggaccgcctggaaagaagaagagggcgcactggttatcagtaatttgccggagcgttttacgcttaagatcattaatgaaataagcccggcggcgaataccgcgctggaagggctttatcagagtggcgatgcgctttgcacccagtgtgaagccgaaggtttccgccatattacgtattatctcgaccgcccggacgtgctggcgcgttttaccaccaaaattattgccgataaaatcaaatatcccttcctgctttccaatggtaaccgcgttgcgcaaggcgaactggaaaacggacgccattgggtacagtggcaggacccgttcccgaaaccgtgctacctgtttgcgctggtggcaggcgactttgatgtactgcgcgatacctttaccacgcgttctggtcgcgaagtagcactggagctgtacgtcgatcgcggcaaccttgatcgcgcgccgtgggcgatgaccagcctgaaaaactccatgaaatgggatgaagaacgctttggcctggagtatgacctcgacatctatatgatcgtcgcggtggatttcttcaatatgggcgcaatggagaataaggggctgaatatctttaactccaaatatgtgctggcccgcaccgacaccgccaccgacaaagattacctcgatattgaacgcgttatcggccatgaatatttccataactggaccggtaaccgagtgacctgtcgcgactggttccagctcagcctgaaagaaggtttaaccgtcttccgcgatcaggagttcagctctgaccttggttcccgcgcagttaaccgcatcaataatgtacgcaccatgcgcggattgcagtttgcagaagacgccagcccgatggcgcacccgatccgcccggatatggtcattgagatgaacaacttctacaccctgaccgtttacgagaagggcgcggaagtgattcgcatgatccacaccctgcttggcgaagaaaacttccagaaagggatgcagctttatttcgagcgtcatgatggtagtgcagcgacctgtgacgactttgtgcaggcgatggaagatgcgagcaatgtcgatctctcccatttccgccgttggtacagccagtccggtacaccgattgtgaccgtcaaagacgactacaatccggaaaccgagcagtacaccctgaccatcagccagcgcacgccagccacgccggatcaggcagaaaaacagccgctgcatattccgtttgccatcgaactgtatgataacgaaggcaaagtgatcccgttgcagaaaggcggtcatccggtgaattccgtgctgaacgtcactcaggcggaacagacctttgtctttgataatgtctacttccagccggtgcctgcgctgctgtgcgaattctctgcgccagtgaaactggaatataagtggagcgatcagcaactgaccttcctgatgcgtcatgcgcgtaatgatttctcccgctgggatgcggcgcaaagtttgctggcaacctacatcaagctgaacgtcgcgcgtcatcagcaaggtcagccgctgtctctgccggtgcatgtggctgatgctttccgcgcggtactgcttgatgagaagattgatccagcgctggcggcagaaatcctgacgctgccttctgtcaatgaaatggctgaattgttcgatatcatcgacccgattgctattgccgaagtacgcgaagcactcactcgtactctggcgactgaactggcggatgagctactggctatttacaacgcgaattaccagagcgagtaccgtgttgagcatgaagatattgcaaaacgcactctgcgtaatgcctgcctgcgtttcctcgcttttggtgaaacgcatctggctgatgtgctggtgagcaagcagttccacgaagcaaacaatatgactgatgcgctggcggcgctttctgcggcggttgccgcacagctgccttgccgtgacgcgctgatgcaggagtacgacgacaagtggcatcagaacggtctggtgatggataaatggtttatcctgcaagccaccagcccggcggcgaatgtgctggagacggtgcgcggcctgttgcagcatcgcagttttaccatgagcaacccgaaccgtattcgtagcttgattggcgcgtttgcgggcagcaatccggcagcgttccatgccgaagatggcagcggttacctgttcctggtggaaatgcttaccgacctcaacagccgtaacccgcaggtggctagtcgtctgattgaaccgctgattcgcctgaaacgttacgatgccaaacgtcaggagaaaatgcgcgcggcgctggaacagttgaaagggctggaaaatctctctggcgatctgtacgagaagataactaaagcactggcttgataaataaccgaatggcggcaatagcgccgccattcggggaatttacccctgttttctcaggcgagtttcagattcaccacgttgcatcacccgttgcaacacctccgcttccagctccgctaatcgcacgctccctaatcgacgcggacgggggatatccactgtcaaatccagaccaatttttccctcttcaattaacagcacccggtcagccatcgctaccgcttcgctcacatcatgcgtcaccaacagtacggtaaagccgtgctcctgccaaagactcacaatcaaatcctgcatctcgagtcgcgttaaggcgtccagcgccccgagcggttcatcaagcaacaataatcccggtcgatgaatcaacgctcttgccagcgccactcgctgtttctgcccgccagaaagtgcggcaggccattcccctgcgcgattctccagtcctaccgcagccaacgctcgacgtgcggcatcgcgccactggcctttaaggcctaacccaacgttatcaatcacgcttttccacggtagcagacgcgcatcctgaaacatcattcgcgtgtcttcctgaatttcagccagcggtgtggtgcccgctaacacatcgcctgcggttggcgtttccagacctgccagcaggcgcagcagggtacttttgccaccaccgctgcggcccaccaccgccacaaactgacctgccggaatatgtaaatccagttggttcaggacgatattttccgcgtaatgtttgcttactgcattgagcaacaatggcgtgccctggttcagacgagcagtattcataccgtggcctccttcaaatgataagccgggttccagcgcaaccagaggcgctctaacagctgcgcgctgacgtcagccagtttgccgagcagggcgtaaagaataatagcgactaccaccacgtccgtttgcaaaaacccccgcgcattcatcgccagataaccaatgccactattggcagaaatggtttcggcaacaatcagcgtcagccacatcaggcccaacgcaaaacgcacgccgaccataatactgggcagggcaccaggcaggatcacatggataaacagcggtatgccggataatccatagctacgcgccatctccaccaacccgcgatcgatattacggatgccatgccaggtgttgatataaatggggaatagcgtaccgagcgccaccagaaagatttttgcggattcatcaatgccaaaccacaaaatcaccagcgggatcagcgccagatgcggcacgttgcgcaacatctgaatactggtatccagcagccgttctccccagcgagatagcccgctaatcagtcccaaaatcaaccccaggcttccgccaatactaaagccaatcagcgcccgccaggagctgatcgccagatgctgccacagttcgccgctggcggagagcgtccagaacgccgtcaccactccttccggactaggcaaaatacgcgtgctcagccagccaacgctggaggccagttgccacaccgccacgatgcccaccggtaaaaaccagggggcaacgcgcaataaccacttcttcactggcgttgccattatttcttccttagctttgcgcgactttacgggggataaaatcattcgccaccgcttcgccttgcggattcagcggctgcggctggggaatttccgggatggcgacatccagaagcgggaacagcaactcgccaacccgatacgcttcttccagatgcggatagccgctaagcacaaaactgtcgatgccaagcgcggcatattcgttgattcgcgcagcgaccgtaggaccatcgcccaccagcgccgtcccggcaccgccgcgcactaagccaacgcccgcccataaattggggctgatctccagattgtcgcgcttgccgttatgtaacgccgccattcgctgttgccctacggaatccgtccgggcgaatgcggcctgtgctttggcgatagtttcatcatcaagatggctgattaaccgctcggcggcctgccacgcttcgtcgttagtttcacgaacaatcacatgcagacgaataccgaaacgaattttgcgtccatgcgcggcagctttcgcccgcacttgttcgattttctctttaaccagttccggcggttcgccccaggtgaggtagagatcaacctgttctgccgccagctcctgggcgacatcactgcttccgccaaagtaaagtggcggatacggctgttgaatcgccgggaagagcagttttgctccgcgcacatgaatatgtttaccgttgaaatcgacggtttctctctgcaataaacgccgccagacctgggtaaattccgcgctggcttcgtagcgctcgctatgatcaaggaacactccgtcgcctgccagctcttgtggatcgctgcctgtgaccaggttaaacaacgcacgtccattactgagacggtcaagcgtggcggcctggcgggcggcaacggtaggactggttacgctgggacgcagggcgacaagaaacttcagccgctgcgtcaccgggatcatgcttgcggcaaccagccacgcatcttcgcaggagcgccccgttggaattagcacaccggtatagccaagacgatccgccgcttgcgcaatttgttgcagataaccgtgatcaaccgggcgactaccttcttccgttcccagataatgcccgtcaccgtgggtcggtaaaaaccagaacatattcagactcataattgttttccttccagttgagtgggctgccagatgcgctggcgaatatcgacttttttcggcaccagacgattttcataaaacagatctgccgtttgctgctgtaaggcggcaacctcggcgttaaccggtttgatggtggtaggagggcgatgatctaagtaagaggcaatcaccggtgccggtaagcccatcgtttttgccagtaaagcgatgctttgctcgcgctggctgcgggttaacgcatcggcctcactaaaggttgccagtacgccctgaataaaagcgccgtttttttctgcatagggacgagctgccagataaaagcttccagtttgattgagatcggtgccgtctttcagcacccgcacgccgccctgtaataatgcagcagagtagtagggatcccagatagcccaggcgtcaacgttaccttgctggaacgcggcgcgggcatcagcgggcgtcaggtaagtgggttggatatcggtaaacttaagtccggcctgacgcagtgcacgcagtaaaaggttgtgactactggaacctttctgaaaggcaactttgtgacctttaagatcggctacggttttgatcgggctgttttctgccaccagaatcacttcggctttgggcttcggtggctcgacgcccacgtacaccaaatcagccccggcagcctgggcaaagattggcggaatatccccggtactgccgagatcaatactgccaacgtttaacgcttccaacatttgcggacccgcggggaactccacccaggagattttactttccggatagcgtttttccagtaactggtggctttttgccagcaccataccaatactgcctttctgatagcctatacgtaacgcttcagggctggattctgcagcaaccgcaaaagtagagacgctaagcaatcccgccagcgccagtttaatgatgttacgcatgggcattacctcgcagagacagaaggtcaggaacctgaacatcgcggcggtgcaatgcctgccagaaagtttctagcgcggtatcaagacgggtttgcagatttggcgtgaactggggtctgtgatggtaatcaattacttgactgtcatcggcaaacacgccgtgcaggatctcctgagctttcagtgcgcttaaaactggtttaagggcataatcgaccgccagcagatgggccacggtaccgcccgtcgccagcggtagcaccactttgccttgcaaagcgcgttctggcagcaggtcgagcagggttttcaacgcaccggaataggcggctttatacacaggcgtggcgacaatcagcccatcggcctgttgcagctgttcggtgaaggtcttgagtgccggactatcgaaacgagcataaagtagatcttccggggcgaagttttgcagattccagtgataaacctctacatccaggccatttagtttttcccgcgcatattccagcaaggagctggagcgagaaggaaagcgaggactacccgccagggtgatgacacgcatactctctccttataaccaattgttctttttttgttaacattgataacaattcggtcagtctgtcggagagacaagaaaattccaaatataaattttgtgtatctttttctgaaaataaactaaagaaagggctttatatatcacgcatatttatttattggatagtcattagatgttgaatcaatgaattactcgttcagttaatatttaaatattcatgaaatctataaattaaagatttgtcacttattggatttagtatgcttgatttaaatggcggacaattattgttattattaagtctaatgtcatttaaaggcattatcatatttacgaagagatcaggatgataacgatgaaaaaaagtgtattgacggcgtttataactgtggtatgtgcaacgtccagcgttatggctgctgatgataatgctatcacggatggcagtgtaacatttaatggtaaagttattgctccagcttgtaccctggtagctgcgacgaaagattccgtggtgactttgccagatgttagtgccacgaagttgcaaaccaatggtcaggtttctggcgtgcaaattgatgtgccaattgaattaaaagattgtgatactaccgtaacaaaaaatgcaacgttcacctttaatggcactgcggatactactcagattacagcgtttgctaaccaggccagttctgatgctgctacaaacgtggccctgcaaatgtatatgaatgatggtacaacggccatcacgccagacacagaaaccgggaacattttgttgcaggatggagatcagacgttgacttttaaagttgattatatcgctacggggaaagcgactagtggtaatgtgaatgcggtaacaaatttccatattaactattattaatagaactcattaattgttttattaattagtacccctccagtgttctggaggggatattcatattttttaagagtgactatttatgaaaacttgcataacaaagggaattgtgaccgtaagtttaacggcaatattactcagctgcagttccgcatgggcggcaggtaaaggcgggattggacttgcagcaacacgtcttgtttatagtgaaggtgaagagcaaattagtctgggtgtacgtaacaccagtccggatgttccttatcttattcagagttgggtgatgaccccagataataaaaaaagtgcagactttattattacaccaccgctatttgtgctgaatccggcaaatgagaatctgttacgcattatgtacattggagcgccgttggcgaaagacagagaaacccttttcttcactagcgtacgggcagtccctagtacaacgaagcggaaagagggaaataccctgaagattgccacacaaagcgtcatcaaacttttctggcgaccaaaaggtttagcgtatcccttaggcgaggctccggcgaaactgcgttgcactagcagtgctgacatggttacggtcagtaacccaacaccttatttcattaccctgacagacctgaaaataggtggaaaagtagttaaaaatcaaatgatttccccctttgataaataccaattttctctgccaaagggggccaaaaatagcagcgtaacgtatcgaaccatcaatgactacggggcggaaacgccgcaactcaactgtaaaagctaagccgtcttcagttaagagagcgagatgtatagaactcatcgacaacacagcctgttaagctctggtggagtgccaagctttattggtgggctggtggtgtttgtgagcgcagcgttcaatgcacaagctgaaacctggttcgatcctgcttttttcaaagatgatcccagtatggtggccgatttgtctcgtttcgaaaaaggacaaaaaataacgccaggggtttatcgtgtcgatattgttctgaatcagacaattgtagatacgcgcaacgtcaattttgttgagataacgccagagaaggggattgccgcctgtttgacgactgaaagcctggatgcaatgggtgttaatactgatgcgtttccggcttttaaacaactggacaaacaagcgtgtgtgccattggcggagattattccggatgccagcgtaacgtttaatgtgaataaactccgtctggaaattagtgtaccgcaaatcgccatcaaaagtaatgcccgtggttatgtcccccctgaacgttgggatgaagggatcaacgcgctattactgggatatagctttagcggggctaacagtattcatagcagcgcagacagtgattctggcgacagctattttctgaatttaaacagtggcgttaatttaggcccatggagattgcgcaacaatagtacatggagtcgtagtagtggccaaaccgcagaatggaagaatctcagcagctatttgcaacgggcggttattcctctgaaaggcgaactgaccgtaggtgatgattatactgcaggcgattttttcgatagtgtcagctttcgtggtgtgcagctggcgagtgatgacaacatgctgccagacagcctgaaagggtttgcgcctgtggtgcgtggtatcgccaaaagcaatgcccagataacgattaagcaaaatggttacaccatttaccaaacttatgtaagccctggtgcttttgaaattagtgatctctattccacgagcagcagcggtgatttgttagttgaaatcaaagaagcggacggcagcgtcaatagctacagcgtaccgttctccagtgtgccattactccagcgtcaggggcgaatcaaatacgcggtgacactggcgaaatacagaaccaatagtaatgaacagcaggagagcaaatttgcccaggccacgttgcagtggggcggaccgtggggaacgacctggtatggtggtggacaatatgctgaatattaccgtgccgccatgtttggtctgggatttaacctcggcgatttcggagcaattagcttcgatgcgacccaggcgaagagtacgctagcagatcaaagcgaacataaaggtcagagttatcgttttctgtatgccaaaacgctcaaccacttgggcactaactttcaattgatgggctatcgctatagcacgagcggtttctacaccctttccgacaccatgtataaacatatggatggctacgaatttaatgacggtgatgatgaagatacgccgatgtggagccgttattacaatttgttttacaccaaacgtggcaaactgcaggtcaatatctcccagcaattaggcgagtacggtagcttttatttaagtggtagccagcaaacttactggcatacggatcaacaggatcggctattacagtttggctacaacacgcaaattaaagatcttagcctggggatttcctggaactacagtaagtcccgtggtcaacctgatgctgatcaggtgtttgctctaaatttttccctgccgctcaatctgttgctccccagaagtaatgatagctataccaggaaaaaaaattacgcctggatgacctctaacaccagtatcgataacgaagggcacactacacaaaacctgggtttaacggagacattactcgatgacggtaacctgagctacagcgtgcaacagggatataacagcgaggggaaaacggctaatggtagcgccagcatggattacaaaggggcgtttgcggatgcccgagtgggctacaactacagcgataacggcagtcaacaacaactgaactacgctcttagtggcagtttagttgcccatagtcagggcattaccctggggcaaagcctgggggaaactaacgttctgattgcagcaccaggcgcagagaatactcgtgtggcgaacagcaccgggctgaaaactgactggcgcggatataccgttgttccttatgccacttcttatcgggaaaatcgaatcgcacttgatgcggcgagcttaaaacgtaacgtggatcttgaaaatgcagtagtcaacgtggttcccaccaaaggggcgttggttctggcggagttcaatgcccatgcgggtgcaagggtattaatgaaaacaagtaagcagggtataccgctgcgttttggcgcgatagcgacgctggacggcgtacaggctaatagcggcataattgatgatgatggcagcctctatatggcgggtttaccggcgaagggaacaataagcgtgcgctggggcgaagctcccgatcaaatttgtcatatcaattacgagcttaccgaacaacaaattaactctgcgattacgcgaatggatgccatatgcagataatctttggagaaaaatgcgtgagtttactacgactattttttgccgccgtcttaatgttatggtgcgctcaaaccgctgcttatagcgggcagtgtcatactactcaggggaatccgtatattggcgtcaattttggcgttaaaaccctggaggaagaagcaaatacggcaggggtagttaaagacaaattttatcagtggaacgaaagcaatgattattatgtttcctgtgattgcgataaagacaatgtcagaagtggccgatgggcattcgccgcggatagtccgttagtctatttaggcgacaactggtacaaaattaatgactatcttgccgccaaagttttattgcaggttaaaggcagttctcctactgcggttcctttcgaaaacgtgggcacagggggggatacccgatggcatatttgcgaccctggcggtcaacgtttaggtgggcagggggcaagcggtaatagcggtagcttttccctgaaaatattgcagccgttcgttggcagcgtcgtcattcctcctatggcgctggcgcgattatatgaatgctacaacatacccgcaggtgattcctgcacgactacaggtacaccggttttagtgtattacctgtctggtacgatcaatagtcttggcagttgttccgtcaatgccggagagacaattgaagttgatttaggtgatgtcttcgctgccaatttccgtgttgtagggcataaacctcttggggccagaacggcagaacttgcaattccagtcaggtgtaacacgggaaacgcgggattagttaatgtcaacctgagtctgacggcaaccacagaccccagctatccccaggcgattaagacgagtcgtcctggcgtgggcgtggtggtgaccgatagccagaacaacattatttcccctgctggtggaacattaccgctctctattcctgatgatgcagacagtatcgcgcgaatgaatgtctatccagtcagcacgacaggtgtaccaccagaaaccgggcgatttgaagccacggcaacggtgagaataaattttgattaacgcgtgaacgtatgaagaaaaaaacgatatttcagtgcgttatcttgttctttagcattcttaacatccatgtcgggatggctgggcctgaacaagttagtatgcatatttatgggaatgtggtcgatcagggctgtgatgtcgccaccaaaagtgcattacaaaatattcatattggtgattttaatatcagtgattttcaggccgcgaataccgtaagcactgctgctgatttgaatatcgatatcaccggttgtgccgctggtattactggcgcggacgtcctttttagcggcgaggctgacacccttgcgccgacactgctcaaactaactgacacaggcggaagcggtggtatggcaacggggattgccgtgcaaattcttgatgcgcaaagtcagcaagaaatcccgctcaatcaggtccagcctcttacgcccttaaaagccggggataacacactcaaatatcaacttcgttataagtccacaaaggcgggagcaacgggcggtaatgcgacggcggttctctattttgatctggtttaccagtgaaggagtgatgttgaaacggataatctggattctgttcttattgggattaacgtggggctgtgagctatttgcccatgatggcacggtcaacattagcggaagctttcgccgtaatacatgcgtgctggcacaggatagcaagcaaatcaatgtgcagttaggcgatgtcagcctgacacgtttttctcatgggaattatggcccggagaaatctttcatcattaatttgcaggattgcggaacagatgtcagcacggttgacgtcacctttagtggaacccccgacggagtgcagagcgaaatgttgtccattgaaagtggtacggatgcagccagcgggctggcaattgcgattctggatgatgcgaagatattgattccgcttaaccaggcgagtaaagactacagcctacatagcggtaaggtgccattaactttttatgcgcaattgcgacctgtcaatagcgatgtgcagagcggtaaagtgaatgccagcgcgacatttgtacttcattatgactaatacgtggaacagattggcgctcttgattttcgccgttttaagcctgctggtggcgggtgaattgcaggcaggagtggtggtcggcggaacgcgatttatctttccggcagacagagaaagcatatctattttactgactaataccagtcaggaatcctggcttattaacagtaaaatcaaccgcccaacgcgttgggccgggggggaagcgagcacagtgccagcaccattactggccgctccgccacttattctcctgaagcccggtacgacaggcacgttgcgcttgctgagaacggaaagcgacatcttgcctgtggatcgcgaaacgctatttgagttaagcattgccagcgtgccatccggcaaagttgaaaatcagagcgtaaaagtggcgatgcgcagcgtatttaaactgttctggcgacccgaaggtttgccgggcgacccgctggaagcttatcaacaattacgctggacacggaatagccagggtgtacaactcactaacccaacgccttattacattaacctgattcaggtgagtgtaaatggtaaagcgttaagtaatgtgggagttgtgccgcctaaaagccagcgtcagacaagctggtgtcaggcaatcgcaccgtgtcatgtcgcctggcgggcgataaatgattacggcgggttgagtgcaaagaaggagcaaaatctgccctgaaacaggttcggaaaacgtttgcgttttttttgccgcaggtcaattcccttttggtccgaactcgcacataatacgcccccggtttgcacaccgggaatccaggagagttcatgtactaccccttcgttcgtaaagcccttttccagctcgatccagagcgcgctcatgagtttacttttcagcaattacgccgtattacaggaacgccgtttgaagcactggtgcggcagaaagtgcctgcgaaacctgttaactgcatgggcctgacgtttaaaaatccgcttggtctggcagccggtcttgataaagacggggagtgcattgacgcgttaggcgcgatgggatttggaagcatcgagatcggtaccgtcacgccacgtccacagccaggtaatgacaagccgcgtctctttcgtctggtagatgccgaaggtttgatcaaccgtatgggctttaataatcttggcgttgataacctcgtagagaacgtaaaaaaggcccattatgacggcgtcctgggtattaacatcggcaaaaataaagatacgccagtggagcagggcaaagatgactatctgatttgtatggaaaaaatctatgcctatgcgggatatatcgccatcaatattagtagcccgaataccccaggattacgcacgctgcaatatggtgaagcgctggatgatctcttaaccgcgattaaaaataagcaaaatgatttgcaagcgatgcaccataaatatgtgccgatcgcagtgaagatcgcgccggatctttctgaagaagaattgatccaggttgccgatagtttagttcgccataatattgatggcgttattgcaaccaataccacactcgatcgttctcttgttcagggaatgaaaaattgcgatcaaaccggtggcttaagtggtcgtccgcttcagttaaaaagcaccgaaattattcgccgcttgagtctggaattaaacggtcgcttaccgatcatcggtgttggcggcatcgacagcgttatcgctgcgcgtgaaaagattgctgcgggtgccagtctggtgcaaatttattctggttttatttttaaaggtccgccgctgattaaagaaatcgttacccatatctaattatttcttcgaattcctctttataagataatcagggctttattttcagccctggttgttttatattcatcgctgttgcttatttagacattttgtacttttattgttgaggttattaagcgaagcgacaatggattgtgttgctgcggttttatagggtaggggagaggcagatgcgaattaaaccagacgataactggcgttggtattacgatgaagagcacgatcgaatgatgctcgatttagccaatggtatgctatttcgcagtcgttttgcgcgcaagatgttgactccagatgccttttctcccgcaggcttttgcgttgacgacgccgcgctctatttctcttttgaagaaaagtgccgcgattttaatttatctaaagaacaaaaagccgaactggtgctgaatgcactggtagcaattcgctatctcaaaccgcaaatgccgaaaagctggcattttgtttcccatggtgaaatgtgggtgcccatgccgggcgatgcggcctgcgtttggttgagcgatactcacgagcaggtcaatttgctggtcgttgaatctggcgaaaatgccgcactatgcctgctggcacaaccctgcgttgttattgcgggtcgcgcgatgcagttgggcgacgccattaaaatcatgaacgacaggctgaaaccgcaggttaatgttgacagcttcagcctcgaacaggcagtttaacgcgccaacttaagtgcagtcttcggtacacagctacagcaaagaatggtgccatcatcgcccattgcactttttttcagcggcgtgacttcgccttctaaaagctgaacacggcaacttccacaaatgcccgcgcggcaagaataagggatacgaattccctgattttctaattgctccagcaacacctgttggttatttccacgaaatgcctgtccctgccagtcaatatctacatttgcgtccggttgttgcgtgatgttggcggtatcatcagcggcagctgcgccgtaaatttttgccggagccgttgccagaatttccacctcatcgccaacgcgaatcacgccgctattacgggcaattaaattctgaccaaaatcgacatcgccgttatcctgggcagtgcggaaagattgcaatgtttttaatggttcgcctgccggatgtttttgccctttttctgggctgacggtggtgaaaatacagcggctacaaggtttaaccacatcaaacaccacatcaccaatgcgaatcactttccagcgatcttcttcccaggcactcgcgccggaaaccaccagattggggcggaattgctccatttttacactggccggacaacgttgttggagatcacgtaagctggcttcgttagcaagaaggtaaggatagccatcagcaaaactcagaggtacagtgttgtggcgtttcacgcgccgggtcatttgtggccccacccagcgtaattgcacttcgcgggagaaaaatccacttagccatttgttgatcgcgtctggcgcaattcgcgcggtaaaatgtgtgccccaaacttcggttggtgcgtcttgtgtggcgaaatcagcaaaacgaacatatgcgctactgccatctggtgcggtgagatgcaagccatcatgcacaggactaggagtaaaccgtaccatctggggaaactggcgagcggtaataaacgtaccgtcaggttccgtgatcataaagatgcgatcgaaggccagaccactgacatctgccagagcatgtgtaagaccaatgccgcgcatgcttttaacaggatgaataaaaagccggattaatgtcgccacggtgcggtcctcaaatgaaaataagccctcaactttatgacatgacgcgcttattagctataatgcgcaacaattttcttagcgcctgtcccattaggctattttatttgtcagtttggccctgggttatgctcgaaatcctcacgtacttgtgtacgctccggtttctccgcgctgtccatgtccagactgactgcaacaattacgcctactgcggtaggctcttagagtaaaagtgacgatatgaattctctgtttgccagtacggcccgtgggctggaagagctgttaaaaactgaactggaaaacctgggggccgttgaatgccaggtggttcagggtggggtccatttcaagggcgacacacggcttgtttaccagagcctgatgtggagccgcctggccagccgtattatgttgccgctgggcgagtgtaaggtttacagcgatttagacctctatctcggtgttcaggcgatcaactggacagagatgtttaatcctggcgcgaccttcgctgtccacttcagtggtttgaatgacaccatccgcaacagtcagtacggcgcgatgaaagtgaaagacgcgatcgtcgatgctttcacgcggaaaaatctgccgcgtccaaatgttgatcgcgatgcgccggatatccgcgttaacgtctggctgcataaagaaaccgccagtatcgctcttgatctgagtggtgatggtttacatctgcgtggctatcgcgatcgtgctggtattgcgccgatcaaagaaaccctggcagccgctattgtgatgcgatccggctggcagccaggaacaccgctgctcgatccgatgtgtggttccggtacgttgctgattgaagcagcgatgctggcgaccgatcgcgcaccaggcttgcaccgtgggcgttggggctttagcggctgggcgcagcatgatgaagctatctggcaggaagtgaaagcggaagcgcaaactcgcgcccgtaaaggcctggctgagtatagctctcatttttacggtagcgacagcgacgcacgggtgattcaacgtgcacgcactaacgcccgtcttgcggggattggtgaactgatcacctttgaggtgaaagatgtcgcgcaactgaccaatccgctgccgaaagggccgtacggcacagtgttgagcaacccgccatacggggaacgtctggacagcgaaccggcgctgattgcgctgcatagcctgctgggtcggatcatgaaaaaccagtttggtggctggaatctctctttgtttagtgccagcccggatctgctaagctgcttgcagctgcgtgcagacaaacagtacaaggcgaaaaacggcccgctggactgcgtacagaaaaattaccacgttgccgaaagcactccagacagcaaaccggcgatggtagcggaagactacaccaaccgcctgcgtaagaacctcaaaaaattcgagaagtgggctcgccaggaagggattgaatgttaccgcctgtatgacgccgatctgccagaatataacgttgccgttgaccgttatgccgactgggtggtggtgcaggagtatgcgccgccaaaaactattgatgctcacaaagcgcgtcagcgtctgttcgatattatcgctgcaaccattagcgtactggggattgcgccaaacaaactggtgctgaaaacccgtgaacgccagaagggcaaaaaccaataccagaaactgggcgagaagggcgagtttcttgaagttaccgaatataacgctcacttgtgggtgaacctgacggattatctcgatactggtctgttcctcgatcaccgcatcgcccgtcgtatgctcggtcagatgagcaaaggcaaagatttcctcaacctgttctcttataccggcagcgccaccgtgcatgcgggattaggcggtgcacgcagcaccaccaccgtggatatgagccgtacttatctggaatgggcagaacgcaacctgcgtctgaatggcctgaccgggcgtgcgcatcgcctgattcaggccgattgcctggcgtggctgcgtgaggcaaatgaacagttcgatctgatctttatcgatccgccaaccttctctaacagtaaacgaatggaagatgcgtttgatgttcagcgcgatcatctggcgctgatgaaagatttgaaacgtctgctgcgtgcaggtgggacgatcatgttcagcaacaacaaacgtggcttccgtatggatctcgacggcctggcaaaactgggactgaaagcacaagaaattacgcaaaaaacgctctcccaggatttcgcccgtaaccgccagatccacaactgctggctgattaccgcagcctgaaaggaatagtaatgagtttaatcagtatgcatggcgcatggctgagcttcagcgacgcgccgcttctcgataacgcagaactgcatatcgaagataacgaacgtgtttgtctggtgggccgcaacggcgcaggcaaaagcacgttaatgaaaatcctcaaccgtgaacaagggctggatgacggtcgcattatttacgagcaagatttgattgtagcgcgtctgcaacaggatccgccgcgtaacgttgagggtagcgtttatgatttcgttgccgaaggcattgaagaacaagcggaatatctgaaacgctatcacgatattagccgcctggtgatgaacgacccgagcgagaaaaatctcaacgaactggcgaaggttcaggaacagctggatcaccacaacctgtggcagctggaaaaccgcatcaacgaagtgctggcgcaactggggttagatcctaacgttgcgctgagcagcctttccggcggctggttgcgtaaagcggcattaggacgcgcgctggtgagtaatccgcgcgtgctgttgcttgatgaaccgacaaaccacctggatattgaaaccatcgactggctggaagggtttttgaaaactttcaacgggacgattattttcatctcccacgaccgtagctttatccgcaatatggcgacgcgcattgttgatctcgatcgcggcaagctggtgacctatccagggaattacgaccagtacctgctggaaaaagaagaagccctgcgcgtggaagaattacaaaatgccgagttcgatcgcaaactggcgcaggaagaggtgtggatccgccaggggatcaaagcacgccgtacccgtaatgaaggccgcgtacgcgccctgaaagcgatgcgtcgcgaacgtggtgaacgtcgcgaagtgatgggtaccgcaaagatgcaggtggaagaggccagccgctccggtaaaatcgttttcgaaatggaagacgtttgctaccaggttaacggtaagcaactggtgaaagatttttctgcccaggttctacgtggcgacaaaattgccctgattggtccgaatgggtgcggcaaaaccacgctgctaaaactgatgctcggtcagcttcaagtggacagcgggcgtattcacgttggcaccaaactggaagtggcttatttcgatcagcaccgcgcggaactggatcccgataaaacggtgatggataaccttgccgaaggtaagcaagaggtgatggttaacggcaagccacgccacgtattgggctatttgcaggactttctgttccatccgaaacgggcgatgacgccggtacgtgcgctttctggcggtgagcggaaccgcttgctgctggcgcgtttgttcctcaaaccaagcaacttattgattcttgacgaaccgaccaacgatcttgatgtcgaaacgctggaactgctggaagaactgatcgacagctatcagggcacggtattgctggttagccacgatcgtcagtttgtcgataacaccgttacagaatgttggatcttcgaaggcggcggtaaaattggtcgttatgtcggcggttatcatgatgcccgtggtcagcaagagcagtatgtggcgctcaaacagcctgcggtgaaaaaaaccgaagaagccgccgcggcaaaagcagaaactgtaaaacgcagcagtagcaaactaagctataaattgcagcgcgaactggagcagctaccgcaattgctcgaagatctggaggcgaagctggaagccctacagacgcaagtggcggatgcttccttcttcagtcagccgcatgagcagacgcaaaaagtgcttgctgatatggctgctgcagagcaggagctggagcaagcctttgaacgctgggagtatcttgaagcgttaaaaaatggtggctgatcgcaaaatagtcgatttaaacagagacagctgacaacggtaaaattgcctgatgaactgggtttatcaggcatgaaaaccaacactttgttagtcatctgtaaaatagcgcatcattaaggagtaccaatgtgcgaacatcatcatgccgcgaagcacatcctgtgcagccagtgtgacatgctggtggcgttaccgcgccttgagcatggtcagaaagcggcatgtccccggtgtggcacaacgttaaccgtggcgtgggatgcccctcggcagcgtcccaccgcctatgcgttggctgcactgttcatgctgttgctgtccaacttgtttccttttgtgaatatgaacgttgcaggagttaccagtgaaattacattactggaaattcccggcgtgcttttttctgaggactacgccagcctcggcacctttttcctgttgtttgtgcaactggttcccgcgttttgtctgataaccattctgttactggtgaatcgcgcggaattaccggtccgtttaaaagagcaactggcacgggtgctttttcaactcaaaacctggggaatggcggagattttcctcgcgggtgtgctggtcagtttcgttaaactgatggcttacggcagcattggggtaggcagcagctttctcccctggtgtttattttgtgtcctgcaactgcgcgcttttcagtgcgttgatcgtcgctggttatgggacgacatcgccccgatgccagaactgcgccagccgctaaaaccaggcgtcacggggatacgtcaggggctgcgtagctgctcctgttgtacggcaatccttcctgctgatgaacccgtgtgcccgcgttgtagtaccaaagggtacgttcggcgtagaaacagcctgcagtggacactcgcgctgcttgtaacgtccatcatgctgtatcttccggctaatattttgcccatcatggtgacggatttattaggcagcaagatgccgagcacgattctcgctggggtcattctgttatggagcgaaggctcttatcccgtcgctgcggtgatctttctggccagtattatggtgccaacgttaaagatgatcgccatcgcgtggctgtgttgggatgccaaagggcatggcaagcgcgacagtgaaagaatgcatttgatttatgaagttgttgagtttgtaggccgctggagcatgattgacgttttcgttatcgcggtgctcagcgcgctggtgcgtatgggaggtttaatgagtatttatccggcaatgggtgcattaatgtttgctttagtcgtcataatgacaatgttttctgctatgacgtttgacccgcgtttgagctgggatcgtcaacctgaaagtgagcatgaggagtcctgacagtatggaatctaataatggggaagccaaaatccagaaagtgaagaactggtctcccgtgtggatatttcctatcgtcacggcgctcattggggcctgggttcttttttatcattacagccatcagggaccggaagtgaccctgatcaccgcgaatgcggaaggaattgaaggtggcaaaaccaccattaaaagccgtagcgttgacgtcggcgtggttgaaagcgccacactggctgatgatttgacgcacgttgaaatcaaagcgcggctgaattccggtatggaaaaattgctgcataaagacaccgtcttttgggtggtgaaaccgcagattggtcgcgaagggattagcggcctgggaacgctgctgtctggagtttatatcgaactgcagccaggcgcgaaaggcagcaaaatggataaatacgatttgctggacagcccaccgttggccccgcctgatgcgaaaggtatccgtgtgattctcgatagcaaaaaagccgggcagctcagcccaggagatccggtgctgttccgtggctatcgggtaggtagcgttgaaaccagcaccttcgatacacaaaaacgcaatatcagctatcaactgttcatcaatgcaccttatgaccgactggtgaccaacaatgttcgcttctggaaagatagtggcattgcggttgatctgacgagtgcagggatgcgtgtggagatgggcagtttgacaacgctgctgagtggcggtgtcagctttgatgtgccggaaggtctggatttagggcagccagtggcaccgaaaacagctttcgttttgtatgatgatcagaagagcattcaggatagcttgtacaccgatcacattgattatctgatgttctttaaagatagcgtacgcggtctgcaaccgggagctccggtagagttccggggtattcgcctgggtaccgtaagcaaagtgccattctttgcgccgaatatgcgtcagacatttaacgatgattaccgtattccggtactgattcgtatcgagccagagcggctgaaaatgcagcttggcgaaaatgcggatgttgttgagcaccttggcgaattgttgaaacgtggtttacgcggaagcctgaaaaccggaaacctggtcactggtgcactgtatgttgatctcgatttctatccaaatacgcctgcaataaccggtattcgtgaatttaatggttatcagattatcccgaccgttagcggcggcctggcgcaaatccagcaacgactgatggaagcgttggataagatcaacaaactgccattgaatccgatgattgaacaggcaaccagtacgctttctgaaagtcagcgcacaatgaaaaacctgcaaacgacgctggatagcatgaacaagatcctcgctagccagagcatgcagcagttgccgacggatatgcagagtacgttgcgtgaattgaatcgcagcatgcagggcttccagcctggctccgcagcctacaacaagatggtggcggatatgcagcgccttgatcaggtgttgcgagaactgcaaccggtgctgaaaacgttcaatgagaagagtaacgcgctggtatttgaagcgaaggacaaaaaagatccagagccgaagagggcgaaacaatgaaaaagtggctagtgacgattgcagcactgtggctggccggatgcagctccggcgaaattaataaaaactattaccagttacctgtggtgcagagcggtacacaaagtaccgccagccagggcaatcgtctgttatgggtagagcaggtcactgttcctgactatctggcggggaatggtgtggtttatcaaaccagtgatgtgaagtatgtgattgccaacaacaacttgtgggccagcccgttggatcaacagttgcgcaacaccctggttgccaacctgagtacgcaactgcccggctgggtggttgcctcccagcctctgggaagcgcccaggacacgctcaatgttaccgtaacggagtttaacggtcgctatgatggcaaggtcattgtcagtggtgagtggctgttgaaccaccagggacaactgatcaaacgtccgttccgtctggaaggagtgcaaactcaggatggttacgatgagatggttaaagtgctggccggtgtctggagtcaggaagccgcttctattgcacaagagataaagcgtctaccttaattataaagatttgtaaatataaccgtctccggtatgttgcctgaggcggtttttttgtctctaacgtgcggaaaaatttgttcctcttcacattttttgtacaaccgacatgcccgtgtagctcacaaatatgacagtggcgtgaattttgcgcattgacggcagttatgattcgcggtattgcttaactgtgattgcacatttagtaatcactgttttcttttccaccagaaaccagtatgagggaaacgaggcatgaagagacaaaaacgagatcgcctggaacgggcacatcaacgtggttatcaggccggcatcgccggacgcagtaaagaaatgtgtccctatcagacgctgaatcaaaggagtcaatggctgggaggctggcgagaagccatggcggacagggtagtaatggcctgattctgtctctttaaaaagaaacctccgcattgcggaggtttcgccttttgatactctgtctgattataatcagaaggcagacgtatcctggaacagaccgactttcaggtcgctggcggtatagatcagacgaccatcaaccagcacttcgccatccgccaggcccataatcagacgacggttaacaatgcgtttaaagtgaatacggtaggtcacttttttcgctgtcggcagtacctgaccagtgaatttcacttcgccaacgcccagcgcgcggcctttaccttcgccgcccagccagccgaggtagaaccctaccagctgccacattgcgtccaggcccaggcatcccggcataaccggatcgccaataaagtggcatccgaagaaccacagatccggattgatatccagttctgcttcaacataccctttgtcgaagttaccacccgtttcggtcattttgaccacacggtccatcatcagcatgttcggtgctggcaattgcgggcctttagcgccaaacagttcaccgcgaccagaggcaagaaggtcttcttttgtataggattcgcgtttatctaccatgttctctgtaagccttattttattgaagcacgcaggatagctaacacgtgtacgctgaacaagtccgatcagttcggaataaaccagttcagccaacgtaatggccatggaaaacggtgacgtccttcctgttggcttgcttgcgcgatacgttcctggatggtttgcatcagcgtcgtttggccttcgccatcccacaccagatttaataataacggcagtgcgtcagtcacatcgtctactgcccagatggtgaatttgccttcttctaccgctttcaccagttcactgtgaagacttaaatggcgaacgttagctgtggggataatgacaccttgtttcccggttaactcacgttgctggcaaatagcaaagaagccttcgattttctcatttaaaccaccgaccggctgggcgcgaccgaactgatcgacactacctgtgatagcgatactctgattcaccggcacatcggcgagggcgcttatcagggcgcagagttcagccatgctggcactatctccatcaacttcactgtaactctgctcaaatgtcaggcttgcactgaaggggatctgttgctcaagctgtagttcgctcatcaggaacgcttgcatgatcatcatccctttcgcatggatattgccgccaagctccgctttgcgttcgatgtcggtgaattcaccatcgccaatatgcacaacgcagctaatgcgagaaggttcgccaaaagcgcgtggatgacccggaaattcaatgacgctaagggcgttaatttgcccgatgcgttcgccttcggtttcaatcaggatttgctcctgaaggatctcatcctgcatacgttcagcgaggaaaccttcgcgccattcacgctgctgcagcattaagtttagctgctcgccggagaaggtgtcgccatcacacagggaggcgacctctttacactggcggaggatccactgcgggctaagcggaagtgtttcttgttcaccggtgtagcgtgctgcttcgcggataagtatcggccaggcatccgctcccggtgcaggtaagtgattatgtctggcggtaaatgtcacccagcgacaccactgggttacactctccgcatcgacaatctgcagagtatcttcaaattcgctataaatagcctgctcactaagctctggctccatctcctggaaatcagccaaactttcgcgttcgcctaccagaatgactttcagcttcaatggcatgctaggcacagagacggggagagggcggctctcatcaaacgcaacccagtcaaaacgctcgcggttaacgatatttttcagccgcatccacagcagaggttgcgccagcagtgtacgcaaagagataatgagaataccgccatttgcctgatgcaccagaccaggctgcagggtaatgtcgccattaaactggcgcaggcagccaaagagttgctccgcttctacccagtcggcagcgacaacttgcgttaaagtcgcaaaattatcatctgcactcactgcgtgacgtaagcggatggagtggccggaaacctcatagtgaccgcccaccagttggcctgcatcgctttgtagcgtacgcgcggcattggcaataagattcagatactcagactcttccggggccttcgccagcataaaagaggaggatgctcgcgtatgcagcaactgctccagcgcaaattgcagccgcggttgagtatcactgaataaaggatcgttttcgtcaatcaaatgtggctgagcaaatatttcctgatagctatcggtatcaggaaccaggtcacgccatgcaagtttcgtaatggtcaaagttgatgttttttagtctgttgtcaaagccgcgattataccgtaaccggcactacagcacacgtagaaagcaccgacaatactcctggcatgggcgttaaagctcacaggatggagattcttttcttcactggcctaaaaagctgatattctgtaaagagttacacggtaacattgagatcgctatgaaatatcaacaacttgaaaatcttgaaagcggttggaaatggaagtatctggttaagaagcatcgcgaaggggagttaatcacccgttacatagaagccagtgccgcccaggaagccgtcgatgtgttgctcagcctggaaaatgaacccgtgctggtaaatggctggattgacaagcatatgaatccggaactggtcaatcgcatgaagcaaaccattcgggcaagacgaaagcgccattttaatgcggaacaccagcatacgcgcaaaaaaaagcatcgatctggaatttattgtctggcaacgtctggctggtcttgcgcagcgtcgcggtaaaacgctttctgaaacgattgttcagctgattgaagatgcggaaaacaaagagaaatacgcgaataaaatgtcttctctgaagcaggatctgcaggcattgctgggtaaggaataactgacgaaagtcagttcaatttactaaaggcaaaaaaaaccccgcagcagcggggtttttctaccagacgagaacttaagcctgcggctgagttacaacgtctttgatacctttaacttcgatctctacgcgacgatccggagccaggcagtcgatcagtgcagcacgctgtttcacgttgtcacaggtgttgccagtaaccgggttggattcgcccataccacgtgcggagatcttgtctgccgggatacctttggagatcaggtaatcaacaacagactgagcacggcgctcggacagaccctggttgtaagcgtcagaaccgatgcggtcggtgtaacccagaacaactacggaaccgtctttcggatccaggttgctcagctggctgtacagctgatccagagcagcctgaccttccggtttcagggttgctttgttgaagttgaacagaacgtcagacttcagagtgaagtgcttggtctgtacttccggtgccggagctggagccggagcaactactggagctgcttcgccctgaccgaaacggtaggaaacacccaggctcagcatgccgttgtccggacgagtgccgatggtgtgtgcgtcaccgatgttgttggtccactggtattccagacgggtagcgatttcaggagtgatcgcgtactcaacaccgccagcgaagaccggagaaacgccggtgtcgtggtttttaccataaacgttggatttagtgtctgcacgccataccatgccacccagacgagtgtagatgtccaggtcgtcagtgattgggtaacccagtttagcggtcagttgaacgccctgagctttgtatgcaccgttttcaacgctgcctttgtacggcatacgacctaaccagtcgtaacccatttcaaagccaacatacgggttaacctggtaaccaccaaaagcaccagcgcccagttggttttcatgggtcgggccattgttgttgatgaaaccagtgtcatggtactgggaccagcccagtttagcaccagtgtaccaggtgttatctttcggagcggcctgcgctacggtagcgaaaccagccagtgccactgcaatcgcgatagctgtctttttcattttttgcgcctcgttatcatccaaaatacgccatgaatatctccaacgagataacacggttaaatccttcaccgggggatctgctcaatattaactctaccgatatcttcggcttatgccgagcacccctggcgatgtaaagtctacaacgtagttgaaaacttacaagtgtgaactccgtcaggcatatgaaaaaaaagtcttgtataaggtatgtttaatcttttttgtcagcgacaatttacagaagagaatcgcggaaaccgcttcagacaagcctccgcaaggaaaattagtcacgactgaaagcattggctgggcgacaaaaaaagttccaggattaatcctaaatttacttaatgatacaaattagagtgaatttttagcccggaaagttgtctcgtggcgtgagaggatgcgcttaccggacgcataataaaccccatagcgttaccttcatttgccgcatcaacaagttcagcatgctcttcttcagtcaaatcatctgccaaccaaccgatcaccacactgtaattgcccgtgcgtaaagcgcgaaccatactctccacagtgtggcaaggggagagctggctaatctgcattactttcgttaagggtagcccagatgcctgaacccattcccgactcagtttttgttgcggtgttaaccagagttgccagcggctttgctgaccgagttgctgtaacaatggcaacagtagaagttgcgtcatcatgggctgatcttcgcgatagacaacttcactgataagcccggctgtagtgttttccgtagagacacgcgcaattttacttgctgcggaactgaagctgctagaacgatgtgcatagccactagtgtacataatcaatccagcccctgtgagttactgtatggatgtacagtacatccagtgacaacaaagatcaaccctattttcggaaagagcctcgcaaattttgtcgttggtgacgggaaaacataaattaatcttgccccttaagaataagttgcctattttcgtagttaacggatccgttaatgtgaatcattcttttatgttatgattttaaaaggaattttatgaaaagcctctcctataagcggatctataaaagtcaagaatacctggcaacgttgggcacaattgaataccgaagtttgtttggcagttacagcctgaccgttgacgacacggtgtttgcgatggtttctgatggtgagttgtatcttcgggcttgtgagcaaagtgcacagtactgtgtaaaacatccgcctgtctggctgacatataaaaagtgtggccgatccgttaccctcaattactatcgggttgatgaaagtctatggcgaaatcaactgaagctggtgcgtctgagcaaatattctctcgatgcagcgctgaaagagaaaagcacgcgcaatacccgggaaagactgaaagatttgcccaatatgtcttttcatctggaagcgattctcggggaggtggggattaaggatgtacgggcgttacgtatacttggggcaaaaatgtgttggttgcgactgcggcagcaaaacagtctggtgacagaaaagattctgtttatgcttgaaggtgccattatcggcattcatgaagctgcgctcccggtggcacgccgccaggagcttgcagaatgggctgactctcttacgccgaaacaggagtttcctgcggaacttgagtaattacgcgctaacaggagtttcctgcggaacttgagtaatctggcgttgcagacgaccaatctcaggcagtaatgcaatcaataatccaacttgttgtacgaccagaggttctttgctgtctgcccgtggttcaagttgctgcatccgctgtttcaggctagctaatgcctcattgacgcgttcttcatcagcaggttgatgatgtaacgcgtcatcaacatagcaaactgcgtcatcaagaaacgccagaatttcaggattagttaactgctcccggtgagcaccgagggcactgatatagctggtaaacgtatggttaaggcacagcaaccgaaacgcggcttcgcgaatttgcggggtaacgttcggctcgctggacatattacttaccacgctcgccagctcagcatcacggttgtgtgcatcgcggcgggcaatacgatacgccagacggttatcacgcccctgatggtattgctccagtatggcatcgagataccgacagttggcctctgtggcacgttcgagcatgcgcggcagattgcgaaactgccagtcaggccagatgtagctcactgccgcccacgcaatggcacaaccaatcagcgtatcgattacgcgaggtaacgctacttcaaaaccttcacccagtaagttaaaacacagtagcaccaaaagtgtgatgaacatcgttgcatgagcgtattgcacgttacggaaggcaaaaaagagcacgccggtaataaccagcagcaccagctgcccttccagacttggcacaaaccacagcacaggaatgccaatggcgatacctaccagcgtaccaataatccttaacttcaggcggtggcgcgtggcgttatagtttggctggcagacaaacaaacttgtcagcaagatccaatacccgtgatgcattccggttatctgaatgatggcgtagccgaagcacaacaccaggctcattcttaccgcatgacggaagagggcggattccggcgtgaagtgacggctaagacgcagccagatatcactcaacccgtgcgggctgtcatcagcgagctcattttcgtcattattatggggtagtgcctgggcctgttcactttcaattgttgccagttgggcatcaatggcgcgtaaattgttcagcaaaaatcccagtgttttgagtaaatcggcgggtgcgccgttatcgcgcatccgctccagcgcagcatcaatatgcgtaaaagcgcgctcaaaatgcggatcatgttgataaggctgacgcaacaaaatacagcgactcagttgctggcacgcctggccctgcatgctcatcagccgctgaaaacggaacagcacgtcgctgtggcgaaaatgttcacgcaatgtttgatactgaatatgagaagagctggcacgctcgtgaatatcctgtgcgacaaagtaataatgcagcgtgcgacgcgttccccgttgaccacgatcgccacgtaagcgggtcagcaggctgagtttcgtctgattcaatgtcgccatcagcagaccgttggcgagagccaaatcgtacagcggtgcctggctttgatcttcaatatcaggatcaaacatgcggctcttgagctcaagataacgcgccagttgttcatagcaacgcgccaggttgtcctgcagcgggcggaccgggaacagcagatgaccaataagtgtcaggacgttgtaccagacggcaccggccagcagatacatcggctgctgataccagtgctcatacagacttgttcccaacatagtgtaaatggcgatcagcaatgcaccgaaggcaattgttgcatagcgttgacccagaccgccgagcaaaatgaagccgctggtagagagcgttaagccaatcgcaaatagccagggccagggaaacagcaattctacactggcgctggcgataaaaaagcagaacagcgtaatgatgaggttacgcaaacgtcccgccagtcggtcatcgagatcggtcagcgccgctgccaccatccccagcgttagcggaatcgtcagttttacatcacccagccaccacggaaacgctgtggttccacaaagcgcaataaaaatacgcgcgtaatacagccaggcgctgttccaggtatagcgtttgagcaaaggacttagcataaaggccatattagtggattattcaaaacgacgacgtgcattggcttcacgcgcagcttgcgctgtttctacgcttaccacgcgacgaccaaccggccatagtgcaatagcggcaattttaaagttcgcaatgccgacaggaatgccaatgatactaatacattgtgcgatgcccgttgcaatgtgcatcaggcataaccaccagccaaagaaaatcagccagaaaatattcaataccgtaccgccagtattcagcagcacatttttgccagccgggttcagttcatcgacatgaatagcttcattgccataaggcaccagagacagtttagtgatctcccagcaggatcgtgtcagcggtaaggtaaaaatcagcacaatactgaccagagtcgccaacagccagcccagagtggtggcaaatccgccaagcacaaagttcagaatgttcaaaacggtacgcataaaacctcgctttactgtggttttcagtaatgggcggcaattgtaacgtttttttgggctggagcacgttttctctgacggttacactgataagaaataatttcgtgtggatctacagagtcatggaactgaaagcgacaacgcttggaaaacgtctggcacagcacccttacgatcgggcggtgatcctcaatgccgggattaaagtctccggcgatcgccacgaataccttattcctttcaatcaattactggcgattcactgtaagcgcggtctggtatggggcgagctggaatttgtactgccggacgaaaaagtggtgcgtctgcacggcaccgaatggggcgagacgcagcgtttttaccatcatcttgatgctcactggcggcggtggagtggcgagatgagcgaaattgcgtctggtgttttacgccagcaactggatttgattgccacgcgcactggggaaaataaatggctgacgcgtgagcaaacctctggcgtgcagcaacaaatccgccaggctttgagcgcgttgccgttgccggttaaccgactggaagaattcgataactgccgtgaggcgtggcgtaaatgtcaggcctggttgaaagatattgaaagcgctcggttgcagcataaccaggcgtataccgaagccatgcttaccgagtatgcggattttttccgccaggtcgagtctagtccgctgaatccggcgcaggcccgggcagtcgttaatggcgagcattctctgttagtgctggcaggtgcaggaagcggaaaaacgagcgtgctggtggcccgtgcaggctggttgctggcgcgtggtgaagcgtcccctgagcaaattttattgctggcgtttggtcgcaaagccgctgaagagatggacgagcggattcgcgaacggctacataccgaagacattaccgcacgcacgtttcatgcgctggcgctgcatattattcagcagggcagcaaaaaagttccgatagtcagcaaactggaaaatgataccgctgcccgtcatgaactctttattgctgagtggcgcaagcaatgcagcgaaaagaaagcgcaggcgaagggctggcggcaatggctgacggaagaaatgcagtggagtgtgccagaaggtaacttctgggatgatgaaaaattacagcgtcgccttgcctctcgcctcgatcgctgggtaagtctgatgcggatgcacggtggtgcacaggcagaaatgattgccagtgcacccgaagagattcgcgatctgttcagtaaacgtatcaagttgatggccccgttattaaaagcctggaaaggtgcgctgaaggcagaaaacgctgtcgattttagcggccttattcatcaggcgattgtgattctggagaaaggtcgctttatcagcccgtggaagcatattctggttgatgaatttcaggatatcagcccgcagcgggcagcgttgttagcggcattacgcaagcaaaacagtcagacgacgttgttcgctgttggtgatgactggcaggcgatttaccgattcagcggtgcgcaaatgagcctcaccaccgctttccatgaaaactttggtgaaggcgaacgctgtgatttagacacgacttaccgttttaacagtcgtatcggtgaggtggcaaaccggtttattcagcagaacccaggccagctgaaaaagccgctaaacagcttaaccaatggagacaaaaaagccgtcacgttattggatgagagtcaacttgacgctttgctggataagctctctggttatgccaaaccggaagagcgcattctgatcctggcgcgttaccatcacatgaggcctgccagcctggaaaaagcggcaacacgctggccgaagttgcaaatcgactttatgaccattcatgccagcaaagggcaacaggcggattacgtcatcatcgttggcttgcaggagggaagtgatggttttccggctgcggcgcgggagagcattatggaagaggcgctactgccaccggttgaggatttcccggacgctgaagaacggcggttaatgtacgtggcgctgacccgggcacgccatcgggtatgggcactgtttaacaaagagaatccctctccctttgtggaaatactgaaaaatctggatgtgccggtggcgagaaaaccgtaagaaacaggtggcgtttgccacctgtgcaatattacttcagacggtccgcgagataacgctgataatcggggatcagaatatcgaccgcgtcgttgaaatgcgggctctggattatgaagtctgccgttgccacgttggtggcgaccggaatgttccataccgtcgccagacgcagcaaggctttcacgtcaggatcgtgcggcacggcatttagtggatcccagaagaaaatcaatacatcaattttcccttcactgatcaatgcgccaacctgctggtcaccccccattgggccactcaacatcgcgttgacgttcatgccggtcgcgcgggaaattaagttaccggtagtgcctgttgcatacagtacgtgttgttccagtaacggttgatgccgttccacccagctcatcagcatttgtttgcagtgatcgtgtgccaccagcgcaatatgtttccgcgcaggtaaagtgcgagtcgtcagttccataatgtacatccgtagttaactttcctacagattactgtaagcacttatcgctgcaagataaagaccgaaaaagcctgcgcacaggcacaaaaatctcaggaagatggttgtttttccgcccactgcaggaaagtatttcgcgtttgtgggtcagccagtttaaaccaatacttcagccgttgttctgtgagcacctgagactgcggtggaatagcatccagctcggaaacaccgctaagcagcgtactgtcatctgccatcatcgtggcaaattgcggtagactagcgcgtttcgcggatttgttatagcgttcaacctcgacctcataatcaatcgtttttgccgtactggtaatggcgagaatatccagctttaccggaatcggcgtcgcatcgccatccaacaattcaaggcgcggcgcggcatcaaaatggttagcttcccgctcattctccaggcgaggcaggcgaaaattgacctggttgatgagctgggtattaaaactgaccaccagcggtggggagatatacagccgttcttcactattggaaagatgaatcgtcttctcaacgcgaaacactaactgatgcggtccattatccagttcaatgctgtccgcaccgcgcagcagagagctggaaaccttcttgccgtcgagtaccagaagatcgacatcggtactaagccgcagcgtggtggcaaaaacggataccggcaaacataatgcaatcaaggtggtcacgatgccggttttcataggtagctcctgtcaaaagaccgcccgaataataatgtgtcaaaatttttctttaatcatacttactaacatatagacatatttcccgcttttgctctcattcattcgtattagctgcatggttggcatgtcggctttgtcgtacactttgttaaacagtctggaggaaataatgaaagaaaccgatattgcaggcattttaacgtccactcacaccattgcgctggtgggggcaagcgacaaacccgatcgtcccagctatcgcgtgatgaaatatctactcgaccaggggtatcacgtcattccggttagcccaaaagttgccggcaaaacgctgctgggccagaaggggtatggcacgctggcagacgttccggaaaaagtcgatatggtcgatgttttccgtaatagtgaagcggcgtggggcgtggcacaggaagctattgccattggcgcgaaaactctctggatgcaactgggggtgattaatgagcaagcggcagtactggcacgggatgccgggttaaatgtggtgatggatcgctgcccggctattgagatccctcgcctgggcctggccaaataaaaaatccccggaaggcaaaaaccttccggggatttgttcagggattagttacgcagacgcggggcctggagttgtttgcggatggtctgcgccagctcatccatggatggctgttcaggatgttcatcctgcaattcgctacttagctgggcttcagccaggtaggtatgaaccggtaggccgttatcgtcctccatcactacgtgataccacggagcggcgcgaagctcgtcattcaccgccagctcatcagggctcggttcagagaggctataaaccgggtcgatatccacgaccactccgagataacctaacagggaatggcggacctgctggccgataccgaatttgctggcaatcatagtcacctcccgggaaatctttacctttgatataagggtaaaattccacatttcaagttacatgacgcgacaggcaaaccctttcagatatagcccttccggataggtagcgatcaccggatgatcggctgcctgacggaactgctctataaattgtacatcacgaccggcatcaattgcggcatccgcgatgattttctgaaataaatcgctggtcatcagaccggaacaggagaaagtcaggagaataccgccttcattcagcagctgaatcgccagcatgttgatgtctttataaccacgacacgcgcccatcaactggcttttattctcaacaaacttcggcgggtccatcacgataacgtcaaatttttcaccgcgatcgcgataagtacgcagcaatttaaagacatcatcacggacaaactcagccttgctcagatccagtttgttcagctcaacgttctgccgtgcaatatccagcgcttcctgggaggtatcaacgctgacaacctggctgcaaccgcccatcagtgcgcttacggcgaaaccaccggtataggagaaacagttcagcacacgtttattttcaacgtagcggcgggtagccaggcggctatcacgctggtccaggtagtagcccgttttgtgtccgtgctgaatatccaccagcagtttcattccgtgttcttcaatcggcagcagggcaggtggcaactcgccggtgacggggccctgggtcagctccattccttcttttttacgtaccgcgacgtcgctgcgatcgtaaatgctacattccgggtacagcgtttgcagggcactaattaatgccgcgcgctgatattctgccccagcactcagcagttgcagcaccagaaaattaccgaaacgatcgatagtaatacccggcaggccatcagattctccggcgattaaacgatagctgtcgaggccatctttttgcgccagccagtcacgccatttttgtgcttgttgcaaacggcgggaaaaaaaagcaatgtcgatagactcagacgggtcaaacgtccagacgcgcgcccggatttggctagctgggctataagcgccgcgtgctaaccattttccctgatgatcaacaatatcgatggtttcaccgaggctggctttaccttccatgcgggcaacggccccggaaaagacccacggatggcgacgaagtaatgatttttcgcgccctttggctaacactaaacgtacactcataatttacttttctgtcgatgcaaagaaatgggcgtcattgtccggagttttccatggatttgcaacgcgtccattaaggataaggagagcagcaatgagcaaagtctgcataattgcctgggtttacgggcgagttcagggcgtaggatttcgctacaccacacagtacgaagcgaaaagactgggtttaaccgggtacgccaaaaatcttgacgatggcagcgtggaagtggttgcttgcggtgaagaagggcaggtggaaaaattaatgcagtggttaaagagtggcggcccgcgttctgcgcgtgtagaacgggtgctcagcgagccgcatcatcccagcggggaattaaccgattttcgtatccgttaaatacattttaccggttttggcaggccagcaattttggtggcttgcttagccggacctttcggaaacagtcggtataaatagcggctgttacctttttcttcgccaaatttattcgccatcgcttttaccagcatacgaatcgccggagaagtattgaattccagatagaaatcacgcacaaaacgcaccacttcccagtgttccggactcaggctaatcccttcgttctctgcaatcaccacagccagcggctcactccactggctgctttctttgagatagccttcggtatccgtttctatctctttaccttcgaagatcagcataattattactaccttaatcagactggcggcagtgtaacaaaaaacaaagccccgcataaagcgaggctatgaaagtgttagcgggtgagattaatcgcggctagcgaagcccagaatgctcagcaggctgacgaagatgttgtacaggctaacatacaggctaaccgtggcacgaatatagttcgtctcaccgccatgaatgatgttgctggtttcaaacaagatagcgccagaggagatcagaatgaagaccgcgctgatcgccagatgcagagcaggcagctgcaggaagatattcgcaaccataccaatcagcaccaccacaatacccgccatcagcataccgccgaggaagctcatatctttgcgggtggtcagcacatatgcagagcagcagaagaacactaacgccgttccgcccagtgccatagcgattacgtcacccattccggcagacagataggtgttcagaataggtccgaggatataacccagaaaaccggtaaaggcgaatgcggagataatcccggtcggcttattcgccgttttataggtcaggaacatcaaaccatacatacccaccagcgtcagaatcagacccggagatggcagcatcagcaccgtactggcagttgcggtaatcgcgctaaaggccagcgtcaggctcagcagaaaataggtattacgcagcaccttatgggtgctaagcagacttgtacggtcatgactagaactaacaatacgatccattgagtcactctctatgacagatgtaattaattaagcagcataatgataatgcgtaagggcacccagaagttttacccatctttacgcatttgatctggaacaggtttaacagcggattatcaggtcattaagcaaatataacgccctgagaatttcgacaggcaaaagaaaaaggggttagcatttagctaaccccttatcttattggaatgacgcgcactataaacatcccgatgcggcgtgtaaacccctaatttgtttgtttgcctgaaaaacagccaaaagtgcattgatagcgtgaaataacagcagattgatcatttcatcaccatgaattccttctcttttactcgtttagcaaccggctaaacatccccaccgcccggccaaaagaaaaataggtccatttttatcgctaaaagataaatccacacagtttgtattgttttgtgcaaaagtttcactacgctttattaacaatactttctggcgacgtgcgccagtgcagaaggatgagctttcgttttcagcatctcacgtgaagcgatggtttgccttgctacagggacgtcgcttgccgaccataagcgcccggtgtcctgccggtgtcgcaaggaggagagacgtgcgatatgaataacgaggaaacattttaccaggccatgcggcgtcagggcgttacccggcgcagctttctcaaatattgtagtctggctgccacgagcctgggattaggcgcgggaatggcaccaaagattgcctgggcgctggagaacaaaccgcgcattccggtggtatggatccacggtctggaatgcacctgctgtaccgaatcttttatccgctccgctcacccactggcgaaggacgtcatcctttccctgatttccctcgattacgacgatactttgatggctgccgccggaacccaggcggaagaagtctttgaagacatcatcacgcaatacaatggcaaatatatcctcgcagtagaaggtaatccgccgctgggcgagcaggggatgttctgtatcagcagcggtcgaccgtttattgagaaactcaaacgtgccgctgccggagccagcgcgattatcgcctggggaacctgcgcgtcctggggctgcgtgcaggccgcgcgacccaatccgacgcaggcaacgcctatcgacaaagtcatcaccgacaaacccattatcaaagtacctggctgcccgccgatcccggatgtgatgagcgccatcattacttacatggtgacctttgatcgcttgccagatgtcgacagaatgggccgtccgctgatgttctatggtcagcgaatccacgataaatgctatcgccgcgcccacttcgacgccggagagttcgtccagagttgggatgatgacgctgcccgcaaaggttactgcctgtacaaaatgggctgcaaagggcctaccacctataacgcctgttcctccacacgctggaatgatggcgtttctttcccaatccagtctggtcacggctgcctgggctgtgcggaaaatggtttctgggatcgcggtagcttctacagccgcgtggtcgatattccgcaaatgggtactcattccaccgccgataccgtcggtttaaccgcgcttggcgtggtggcagcggctgttggtgtgcacgcagtcgccagcgccgttgaccagcgcagacgtcataaccagcaacctacagaaaccgaacatcagccaggcaatgaggataaacaggcatgagcactcagtacgaaactcagggatacaccatcaataatgccggacgccgcctggtggtcgacccgattacgcgcatcgaaggccacatgcgctgcgaagtgaatattaacgatcagaatgtgatcaccaatgccgtctcctgcggcaccatgtttcgcgggctggagatcatcctacaagggcgcgacccgcgcgatgcgtgggcgttcgttgaacgtatctgcggcgtctgtactggcgtacacgccctggctagcgtttacgccatcgaagatgctatcggtattaaagtgccggacaacgccaatatcatccgcaacattatgctggcaacgctctggtgccacgatcatctggtgcacttctatcagcttgccgggatggactggatcgatgtgttagatgcgctgaaagccgacccgcggaaaacttccgaactggcgcaaagtctctcctcttggccgaaaagttcccctggctatttcttcgacgtacaaaaccgcctgaaaaaatttgttgaaggcgggcagttggggatcttccgcaatggctactgggggcacccgcagtacaaactgccgccagaagctaacctgatgggctttgcccactatctcgaagctctcgatttccagcgtgaaattgtcaaaatccacgcggtctttggcggtaaaaacccgcatccaaactggattgtcggcgggatgccttgcgccatcaacattgacgaaagcggcgcggtcggggcagtcaatatggaacgcctgaacctggtgcagagtattatcacccgcacggcggacttcattaacaacgtgatgatccccgacgccttagccatcggtcagttcaacaaaccgtggagcgaaatcggcactggtctttctgataaatgcgttctcagctacggcgcattcccggatattgccaacgactttggcgagaaaagtctgctgatgcctggcggcgcggtgattaacggcgacttcaacaatgtgctgccagtggatttggttgatccgcagcaggtgcaggagtttgtcgaccacgcctggtatcgatatcccaacgatcaggtcgggcgtcatccgttcgatggcatcaccgacccgtggtacaaccccggcgatgtcaaaggcagcgataccaacattcagcagctgaatgaacaggaacgctacagctggatcaaagcgccacgctggcgcggtaacgcgatggaagtggggccgctggcgcgcacgttaatcgcttatcacaaaggcgatgctgcgaccgttgagagcgtcgatcgcatgatgagcgcgttgaacctgccgctttccggtatccagagtacgttaggccgcattttgtgccgcgcgcacgaagcgcagtgggccgcaggtaagttgcagtatttcttcgacaagctgatgaccaacctgaaaaacggcaatctcgccactgcttccacggaaaaatgggaacctgcaacctggccgacagagtgccgtggtgtcggttttaccgaagcgccgcgcggggcgttaggccactgggccgccattcgcgatggcaagattgatctctaccagtgcgtggtgccgaccacctggaacgccagcccgcgcgatcccaaagggcagattggcgcttatgaagcggcgctgatgaacaccaaaatggcgatccccgagcaaccgctggagatcctgcgtactctgcacagctttgacccgtgcctcgcctgtagtacacacgtgctgggcgacgacggtagcgagctgatctccgtgcaggtgcgttaacagcgaaggagaatcatcatgcaacagaaaagcgacaacgttgtcagccactatgtctttgaagcgccagtgcgcatctggcactggttgacggtgttatgcatggcggtgttgatggtcaccggatactttatcggcaagccgctaccttccgtcagcggcgaggcgacgtatctgttctatatgggctacatcaggttaattcacttcagcgccgggatggtttttaccgtggttttgctgatgcggatctactgggcttttgttggcaatcgatactcccgcgagctgtttatcgtgccggtatggcgtaaaagctggtggcagggcgtgtggtatgaaatccgctggtatctgtttctggcaaaacgtccgagtgccgatataggccataatcccatcgcccaggcggcgatgttcggctatttcctgatgagcgtctttatgatcatcactggttttgcgctgtacagcgaacacagccagtacgctatttttgcgccgttccgttatgtggtggaatttttctactggacgggtggcaacagtatggacattcacagctggcatcggctggggatgtggctgattggcgcgtttgtgatcggtcatgtctacatggcgctgcgtgaagacatcatgtccgacgacacggtgatctccaccatggtcaacggctaccgtagccacaaatttggcaaaataagtaacaaggagcgtagttgagctaaataagtaacaaggagcgttcatgagcgagcaacgcgtggtggtcatggggctgggcaacctgctgtgggccgatgaaggcttcggcgtgcgggtggcggaacggctgtatgcccattaccactggcccgagtatgtggagattgtcgatggcggtactcagggactgaacttgctggggtatgtcgaaagcgccagccatctgttgattctcgatgccattgactacgggctggaacctggaacgctgcgaacctatgccggagaacgcattccggcttatctcagcgcgaagaaaatgagcctgcatcagaacagtttctccgaagtgttggcgctggcggatatccgcggacatctgccagcacatattgccctcgtcggtctgcaacccgcaatgctcgacgactacggcggtagcctgagcgaactggcacgggagcaactgcccgctgcggaacaggcggcgctggcgcagcttgctgcgtggggaattgtgccgcaaccggctaatgaaagccgctgtctcaattatgactgtctgagcatggaaaattacgaaggcgttcgcttgcgccagtaccggatgacacaggaggagcagggatgagcaacgacacgccatttgatgcgttgtggcaacgaatgctggcgcgcggctggacgccagtcagtgaatcccgtcttgacgactggcttacgcaagcgccagacggcgtggtgttattaagcagtgacccgaaacgcacgccagaggtcagcgataatccggtaatgattggcgaattactgcgcgagtttcccgactatacatggcaggtggcgattgctgaccttgagcagagcgaagccatcggcgatcgctttggcgtctttcgctttcctgccactttagtgtttaccggcggaaactatcgcggcgtgctgaatggtattcacccgtgggcggaactgataaacctgatgcgcgggcttgtcgaaccgcagcaggagcgtgccagttgatctaaccgcagcaggagcgtgcctcatgagcgaaacttttttccatctgctggggccaggaacgcaaccgaacgatgacagtttcagcatgaatccactgccgatcacctgtcaggtgaatgatgaaccgagtatggcggccctggagcaatgtgctcacagcccgcaggtgattgcgctgttaaacgagttacaacatcaactaagcgaacgccaaccgccgttgggcgaggtgctggcagtcgatctgttaaatctcaacgccgacgatcgtcactttatcaatacgcttctcggggaaggggaagtgagtgtgcgcattcagcaggctgacgacagtgaaagtgaaatacaggaggcgatcttctgcggattatggcgggtgcgcagacgtcgcggcgaaaagttgctggaggacaaactggaggctggctgcgcgccgctggcgttgtggcaggcggcaacgcaaaatctcttgccgacagatagcctgttaccgccgcccattgatggcctgatgaatggcctaccgttggcgcatgagttactggcacatgtacgtaaccccgacgcgcagccgcacagcattaatctgacgcaattacccatcagcgaggctgatcggctttttctcagtcgtctctgtgggccgggaaatattcagattcgtaccattggctatggcgagagctatatcaacgccacggggttacgccatgtctggcatttacgctgtacggacaccttaaaaggcccgttactggaaagttatgaaatctgcccaataccggaagtggtgctggcagcgccagaagatttggtcgactctgcgcagcggcttagcgaggtatgtcagtggctggcggaagctgcaccgacgtaaaaagacggtaagtatcgctttcagtcttatgaatatcgcaatcggcgaatacctctggtcgtagagtttcaggataaagagggagatctaccattatcgggttatttttctctcttcgcctacaggagtgcgcatgtgggatgtcattgatttaagccgctggcagtttgctctgaccgcgctgtatcactttttatttgtaccccttaccctggggctgattttttttgctggctattatggaaaccatttacgtggtcaccggcaaaacaatctaccgcgatatgacgcgcttctggggtaagctcttcggtatcaattttgctcttggcgtggctaccggcctgaccatggagtttcagtttggtactaactggagtttctattccaactatgtgggcgatatttttggcgcaccgctggcgatggaagcattaatggccttcttcctcgaatccacctttgtcgggctgttcttcttcggctggcaacggctgaataaataccagcacctgctggtgacgtggctggtggcgttcggtagtaatctctctgcgttgtggatattgaatgccaacggttggatgcaatacccgaccggtgcgcattttgatatcgacaccctgcgtatggagatgaccagcttcagcgagctggtctttaatccggtcagccaggtgaaatttgtgcacaccgtaatggcgggctacgtgaccggggccatgtttattatggcgatcagcgcctggtatttactgcgcggacgggagcgcaatgtcgcattacgcagctttgccatcggttccgtcttcggtactctggcgattatcggtaccctgcaactcggagacagttctgcgtatgaagtcgcgcaagtacaaccggtaaaactggcggcgatggaaggggagtggcaaacggaacctgcacctgcaccgttccatgtggttgcctggccggaacaggatcaagagcgtaacgcctttgccctcaaaattcccgcgctgctagggatcctcgccactcacagtttagataaacccgtgccgggtctgaagaatttgatggctgaaacctacccacgcttgcaacgcggacgtatggcctggctgttaatgcaggaaataagccaaggcaatcgtgagccgcatgtgttgcaggcattccggggactggaaggtgacctgggctacggcatgttgctctcccgctatgcgccggatatgaatcatgtcacagccgcacagtaccaggcggcgatgcgtggcgcgatacctcaggttgcgccggtattctggagtttccgcatcatggtgggctgtggttccctgctgctactggtgatgctgattgcgcttgtccagacgctgcgtggcaaaatcgaccagcatcgctgggtgctgaaaatggcgctctggagtttgccgttgccgtggattgcgattgaagccgggtggtttatgaccgagtttggtcgtcagccgtgggcgatacaggacatcttaccgacatactccgcgcactccgctttaaccacaggacaactggctttcagtctgatcatgatcgtagggctttacaccctgttcttaatcgccgaagtctacctgatgcagaaatatgcccgtctggggccgagcgcgatgcagagtgaacaaccgacgcagcaacaggggtaaaggagaaaatcatgtttgattatgaaacattgcgcttcatctggtggctgctgattggcgtgatcctggtggtctttatgatctccgacggatttgacatggggatcggctgtctgctgccgctggtggcgcgtaatgatgatgaacgccggatagtgataaacagcgttggtgcacactgggaaggcaaccaggtctggttgatcctcgctggtggggcattatttgccgcctggcccagagtgtatgcagcggcgttttccggcttttatgtggcgatgatcctggtgctgtgcagtctgttcttccgcccgctggcctttgattatcgcggaaaaatcgccgatgcacgctggcgtaaaatgtgggacgccggtctggtcatcggcagtctggtgccgccggtagtcttcggtatcgccttcggcaacttgttgctcggcgtgccgtttgccttcacaccgcaattacgcgtggagtatctcggcagcttctggcaactgctgacgccattccctttattgtgcggattgctcagccttgggatggtgattttgcaaggtggcgtctggttacaactgaaaactgttggtgtgattcatctgcgtagtcagctggcgaccaaacgcgctgcactgttggtgatgctgtgctttttgctggcgggttactggctgtgggtcggtattgatggctttgtactgctcgcccaggatgctaacggtccttccaatccgttaatgaaactggtggcagtgctacctggtgcctggatgaataattttgtcgagagccccgttttgtggatcttcccgctgctgggattcttctgcccattgctgacggtgatggcgatttatcgtggtcgcccgggttggggatttttgatggcaagtttgatgcaatttggcgtgattttcacggcaggcatcacgctgttcccctttgtcatgccgagtagcgtgagtccgatctccagcctgacgttgtgggacagtacttccagtcagctgacgctgagcattatgttggtaatcgtgctgatatttttgcccattgtgttgctctacactctctggagctactacaaaatgtgggggcgcatgacaacagaaactctccgccgtaacgaaaacgagttgtactaaggagcagaaacaatgtggtatttactttggttcgtcggcattttgttgatgtgttcgctctccacccttgtgttggtatggctggacccgcgtctgaaaagttaacgaacgtaggcctgatgcggcgcattagcatcgcatcaggcaatcaataatgtcagatatgaaaagcggaaacatatcgatgaaagcgatcttaatcccatttttatctcttctgattccgttaaccccgcaatctgcattcgctcagagtgagccggagctgaagctggaaagtgtggtgattgtcagtcgtcatggtgtgcgtgctccaaccaaggccacgcaactgatgcaggatgtcaccccagacgcatggccaacctggccggtaaaactgggttggctgacaccgcgcggtggtgagctaatcgcctatctcggacattaccaacgccagcgtctggtagccgacggattgctggcgaaaaagggctgcccgcagtctggtcaggtcgcgattattgctgatgtcgacgagcgtacccgtaaaacaggcgaagccttcgccgccgggctggcacctgactgtgcaataaccgtacatacccaggcagatacgtccagtcccgatccgttatttaatcctctaaaaactggcgtttgccaactggataacgcgaacgtgactgacgcgatcctcagcagggcaggagggagtattgctgactttaccgggcatcggcaaacggcgtttcgcgaactggaacgggtgcttaattttccgcaaagtaacttgtgccttaaacgtgagaaacaggacgaaagctgtagtttaacgcaggcattaccaagcgaactcaaggtgagcgccgacaatgtcagtttaaccggtgcggtaagcctcgcaagtatgctgacggagatatttctcctgcaacaagcacagggaatgccggagccggggtggggaaggatcaccgatagtcaccagtggaacaccttgctaagtttgcataacgcgcaattttatttgctacaacgcacgccagaggttgcccgcagccgcgccaccccgttattagatttgatcaagacagcgttgacgccccatccaccgcaaaaacaggcgtatggtgtgacattacccactagtgtgctgtttatcgccggacacgatactaatctggcaaatctcggcggcgcactggagctcaactggacgcttcccggtcagccggataacacgccgccaggtggtgaactggtgtttgaacgctggcgtcggctaagcgataacagccagtggattcaggttagcctggtcttccagactttacagcagatgcgtgataaaacgccgctgagtttaaatacgccgcccggagaggtgaaactgaccctggcaggatgtgaagagcgaaatgcgcagggcatgtgtagcttggcaggttttacgcaaatcgtgaatgaagcacgcataccggcgtgcagtttgtaatgcataaaaaagagcattcagttacctgaatgctctgaggctgatgacaaacgaagaactgtctaatgcgtagaccggaaaaggcgttcacgccgcatccggccactttcagtttgcaatacgtacgcttgagatcaggattgtctactttgagtataacatccttgtgaaatctccctttcctcataccgcttgcactatatactgcgggtaggaaaggcgcgcagagggaaatataagattgttaactatccccctctggaaatacgacttgtgagcataagataaatcttagcaaaatacaaattaaagataaggaaattgttacgaaagctattaattattgttggtaatatagtttcaagtggtactataactggctgttaaatggcatttataactattaggtgcagagatattcgcttaaatggattagtttctttgtggaaaagtaactgatgttataatgtatgatgttgactatttcactattccaataaaaccagtcagctttaaacaagcagcgtcatattaagagagataaacatttgccgctgttggtcctcgcaggccatttacgcggcaaaattccacacgtaatcctggtataagcacttctgcgtcgcggggagtgaatgcggaaatatggacctgaacttctttacgaccgtcggaggggataatgaatcctttgccgcttttgcgatcaaaggttttgacaattcctgtcattttacgggacaaacaaattccttactgaaaatactgcgctgcactatacggggttaataaaataaagccagcgatatttaagaccgccggacggctaaaataaaatttgcttaatctcaattatcatgcgttaatagctgcgtcggtttgaaagacagacagcatacaaagtagtttactaaagcagttctcattatcaggcattatccccttcttttgagtctctctcctgaacactaagtagtttctgtattaaagccctgtttgccgaaaggcccaaaatgaaggaagtaaaatatgtctaataaaatgactggtttagtaaaatggtttaacgcagataaaggttttggctttatcactcctgatgatggcagcaaagacgttttcgtccatttcaccgccatccagagcaatgaattccgcacgctgaacgaaaatcagaaagttgaattttctattgagcaggggcaacgtggccccgcggcagcgaacgttgttacgctctaaggttgccattattactcaacatctccatttccgctgtccatgttgtcatggttcacagtaccgcacatcggcattcgatgtgacggagcgaaaccctttgggcgctaagtgtattttttgtaaatcgacgatgatcacctttgataacgtcgcgctgcaaatacgcactgaccatgcgccgctggattagtcaaaataatatcaggctccctcgtggagccttttttatatctgccttatttttcttcaacgctgtatgtatagtaagcgataacctgttgattattgaatctttcggggagatggcttataacatttcttacctgaccagggtaccgggaaccaacaccttactggcgtgttgctgtcttttaagaccagaagaggttaacagtgaatattgaagagttaaaaaaacaagccgaaacggaaatcgccgactttatcgcgcaaaaaatcgccgagctgaacaagaatacagggaaagaagtctctgaaattcgcttcaccgcacgagaaaaaatgaccgggcttgaaagttatgatgtcaaaatcaaaataatgtgattttgtgaacatcaccccgtgcgaggtgatgttccgcttgttgctaatttagtgaccaatcattggcgcttgtggaattaagcgtcggtacaattcctccggcaccgggctttgccatactcccgcatacattgcgtaaccaatcaccgcaaacataatccccagaaccagtagcgtcattaaccagccagacaacgcaaaggcttttttatttgccgcaggtttttgcagactaaaggtcaatgtactggctaccggacaactctctacgcaagtcatacagccggtacattccactgttcgtacctgaattaatttatcgaccgggatccgacttgggcaattttttgcgcatttgccacagtcgatacaactttcggcattgcgacgaatcttaaacgggctcaataggctaaccacgcccatcagcgcgccatatgggcaaagataacgacaccaggcatggcgaataaacaggctggcaatcagcaaaacggtcacgctgattaatgtcgcggtccccatatgacgaaagaaatcgagcattttaacgtccatcaccacgctgtaggggctcaacataaaatagtgaatcgcctgagcgggcatcaataacgcgatatagataaaaaaactcaacagcaaatacttcacgccgcgcagaggaatatccagccagcggggaaggacacattgccgaccaaacagtttgttaccgagatcgccgattaattcagaaagcgtaccaaccgggcataaccaactgcaaaaggcctttttgagtaatagactgatgacgataaaagcgaccaataacagcatcgcggcggcgtggacggacggtaactgacctgttacaaggctatatttcagattcatcagcccggcaatcggtagccagccttcgatacctcccggtctggcgacaaatgtcgtgctacttgccgtttcgtaatagcgcacccaataccagaacgtgatggcaatataaatattcattgccaacagtaataattgcgtcgctttacgccaggtcgtggcattacgccagtcattccacggtaatttgccgcccgtcgtgcctggccgccgctgccagcgggttcttttattctctgccatgattttgccagtccgttaagttgtataccaaatgccactattctagttgttcttaactggctgatattgattcaaatcgcgttcaggtctttcttatgcaaccatgcttccagagcggcaacactgcgtgtaatttcttcgtgtggaaggggggcagataatggctgctgctccagttgtgcgcatagctggctggcgatatgcattcccagactgctgcaactgctttttagctgatgcgcggcacgctttattttctcgctatcctgactggcgcgggcaatgtcgatttcatcgagaagcggcagggcatgttgtgtaaataataccagccattcgtggatcttctccgtccccattaactgagcatcttcattgagttggcttacatccaggctttgatcattattgacttgcagttggagatagtgcgccagtaactgaccgagcacttcacgcggcaccggtttagggataatcccgcggaataaactactggtacgctggcgcagcgtttcgtcaatgacatgggcgctaaagccaatcaaaaccaggctcggatattgctgtgccagttgtcgggcaagcgtaatgccgtcgatatccggcagatcaaaatccaccagtgcggcagcaaacggttcgctattttgcagtgtctctaaagcctgcgcggcattgccaacagcaacaatctgcgcaccactggttttcagcatctcaatggtaattcgctgggttagcgggttatcttcaattaacagcaaacgtaaaccgtcaagacgcaccgcctgattgactgtttttggcacgggtgccgtggcaacacgtaacggcaagcgtaaacaaaaacagcttccaacctccggcgtgctggtggcgctcagttcgccgcccatcgcctgggccagacggctactgatagtcagtcccagcccggtgccgccgcgtttgccgcttacctgcacaaatggctggaagatttctgccagtttcgcgggatcaataccgcagccgctgtcttccacttcgaccagccattgctcgccatcagtgcgactacgcaggataatgtacccttcgtcagtaaaacgcagggcgttgctcaacaggttggttataacctgacgaatacgtcgtggatcgcccattaacgcgcacggcatatcatcggcaattgccgttgccaggcgaatcgggcgacctttcacccgtccgctcattaattgcagggtactttccagcagcgggcgcggttcaaagggctcatcgctgacgctaacattcttgccacctgcttcgatagcggaataatcgagaatatcgttgaggatggtcagcaagctttcaccagagtcagtaattgcccgcaaatcatcacgctgggcgttaagtgcggggttatctgccagcagttgagcagtgccgagaataccgtacagcggtgtgcggatctcatggctcatcgccgccagaaacgcgctttttgcctggctggctttttctgcttccgcccgtgcctgtcggtgttctatcaccagttcctgcaattcagctgtacgcgctttgacctgcgccgccagctgttcgcggtggcgattcagtgcatgaacattgctgcgaaacgcatccatcagccgcccgatggtatccagctcccgtacgccagcggtttccgggaaaggggagtcaatatcaccgtccagcagccgttgcagcgcctgcgtttgttcggcaagtggacgcgtgacactgcgataaaccacgcgccagaggatcagaatcagtgcgcaaagactaaccatccccagcaataacaggctgtattgcccgcgtgcactcgctttttccagatgcgccagtccgtgctgattacgcagctcaatggtgtcgaccagctgactgacttcgctactaaactgcgcgaactgggcgatgttattttgtgcgagagtttgtaggtgattgctgatttcactgtcctgctgatacagcgccagcaaatcgctatattggctaacggtagttaacgttgttgcgacctgcgcacgaacacccggatcttcaatgcgtatttgccgacgttgcagaattttcaccgcattattgagctgcttttccagcgttggtgcatttttctggatctgctccagccccagattcatcaccatttgctgcacccgcagagcgctaaggcgcagttcattcatctggttaacatactcaagatcgatatcaatcagccgatcgagtgcactttcagcagcctgacgctgatcttgttcgatcaaatcgtaaatcccggcctgggtcgctccagcggaagttgtcgcattattcgcctgaccttgcgccaggcgtgcgatctcatcggcggcagcgactatctgctgactgagttgctgttgttgctggcgcagttgcaaacgctgccccaccagttccccttgctgacgtaagctacgggagatctcctgctcctgttgttcaatagcggtggtatcaaaaccttgttcccgtaacgcttgcagcaacgcattaatcttcaggctttgtgcggtgagcattcgcccctgcgcctgccacatcttttcgttatcggcactggtcaggttctgcgcggcgaaaagttcccaggcgctggcttcgctcaactggcgcgccatattcatggtaggaatcaatgcctgagtgttgtctttttccacctggctgataaagcgcaggttgtaccatcccaccagggtactggtcagggttaacagcgccatcagggcaaagcccatccagagtcttcgggtcagggttaaattcacggtcggtgcactttaggtgaaaaaggttgagtcgcaaagcggaatgcatctagcataaagccttattattgatgaggctatcatgcgcgtactgctatttttacttctttcccttttcatgttgccggcatttagcgctgataacctgttgcgctggcatgatgcgcagcatttcacggtgcaagcctctacgccgcttaaagccaaacgcgcatggaaactgtgcgcgctttatcccagcctgaaagatagttattggttaagcttgaactatggtatgcaggaggctgctcgccgctacggtgtggatttaaaagtgctggaggcaggcggctacagccagttggctacccagcaagcacaaatcgaccagtgtaaacagtggggcgcagaggccattttgctcggtagtagcacgaccagttttcccgacctgcaaaagcaggtagcaagtctgccggtgatcgaactggtaaatgctattgatgctccccaggtgaaaagccgcgttggtgtgccctggtttcagatgggctatcaaccggggcgatatctggtgcaatgggcgcacggtaaaccactgaatgtgctgttgatgcccggacccgataacgccgggggcagtaaggagatggtcgagggttttcgcgcagccattgccggaagcccggtgcgtattgttgatattgcgcttggtgataacgatattgaaatccagcgtaacctgttgcaggagatgctggaacgccatccagaaatcgacgtcgttgccggaacggccattgcggcagaggcggcaatgggggaagggcgtaacctgaaaacgccgcttaccgtggtgagcttttatcttagtcatcaggtgtatcgcgggctgaagcggggaagagtgattatggctgccagcgatcaaatggtctggcagggggaactggcggttgagcaggccatcaggcaattacaggggcaaagcgtttctgataatgtcagcccaccgattttagttctgacgccgaaaaatgccgaccgtgaacatattcgccgcagcctgagtccagggggatttcgtccggtctatttttatcagcacacaagtgcggctaagaaataatcagcacacatcagcggctaagaaataaccttcaccatgttgcgtcaccagtaaatccgcgctgagtttatgacgtaaacgacgaattaacacatcgacggtgcgcaggtcagggttttccacccgacgcgcagaaagcatacgtagcagacgttcacggctgagaatttcgcccggattcgtcacaaatgccaccaacatttcatactctgcgcgggtcagtttaatcggctcgccatcccgctccagcgtatggcggctcacattcaggcaataaccggcaaagcgatagcagttgtcctgagtgtgcggttgagcttgtcgcgcgaggtcgattcgccagagcagatttttcacccgtactaccagttcgcgcagttccagcggtttggtgacgtaatcgtctgcgcccatttccagcccaacaatacggtcaatccgatcgctgcgtccggtaaccagaataatccccaccgtactgcgttctcgcagggcgcgggttaacatcaggccattttcatcgggtaagttgatatccagcagaattaaatctacgctctgattctgcataatttcccgtagcccagcaccgctcgccgtaacggaaacggtatacccctcctgagtgaagtaggattgtaatcgcgcctgggtaaccggctcatcttcaacaataacaatgtgatgtggcatcagagggttttactcattctgttcatatctgttcatattctgccgtaagccgttcatcctgaccagtgccgctgttcatatttgctcattaagatcgcttcactaaaccataattctacaggggttattatgcggaaactctggaacgcgctacgccgacccagtgctcgttggagcgtactggcgctggtcgcaattgggattgtgattggcattgcgctgattgtattgccacacgttgggatcaaagtcaccagcacaaccgaattttgtgtcagttgccacagtatgcaaccggtgtatgaagaatataaacagagcgtgcatttccagaacgcctccggcgtgcgagctgaatgccatgactgtcatatcccgccggatattccaggcatggtgaagcgcaaactggaagcgagcaatgatatctaccagacctttattgctcactccattgatacacctgaaaaattcgaagccaaacgcgcggaacttgccgagcgtgaatgggcgcgaatgaaagaaaacaacagcgcaacctgccgctcctgccataactacgatgcgatggatcatgcgaagcagcatcctgaagcagcacgtcagatgaaggtggcagcgaaagataatcaatcctgcatcgactgtcataaaggtattgcccaccagttaccggatatgagtagcggcttccgtaagcagttcgatgagctgcgcgccagtgctaatgacagtggtgacacgctgtactctattgatattaagccaatttatgcggcgaaaggcgataaagaagcctctggttctctgctgcctgctagcgaagtgaaagtccttaaacgtgacggcgactggctgcaaattgaaattaccggctggacggaaagcgccggacgtcagcgtgtactcacccaattcccaggtaaacgcatctttgttgccagcattcgtggtgatgtgcagcagcaggtaaaaacgctggagaaaaccaccgttgccgacaccaataccgagtggagcaagttgcaggccactgcgtggatgaagaaaggcgacatggtgaacgatatcaaaccgatctgggcttatgcggatagcttgtacaacggcacctgtaaccagtgccacggcgcaccggaaatcgcccactttgacgctaacggttggatcggcacgctcaacggcatgattggctttaccagtctcgataaacgtgaagaacgcaccttgttgaaatatctgcaaatgaatgcgtctgacaccgcaggtaaggctcacggcgataagaaggaagaaaaataatgaacaataacgatctctttcaggcaagtcgtcggcgttttctggcacaactcggcggcttaaccgtcgccgggatgctggggccgagtttgttaacgccgcgacgtgcgactgcggcgcaagcggcgactgacgctgtcatcagcaaagagggcattcttaccgggagccactggggggctatccgcgcgacggtgaaggatggtcgctttgtggcggcaaaaccgttcgaactggataaatatccgagcaaaatgattgccggattgccggatcacgtacacaacgcggcgcgtattcgttatccgatggtacgcgtggactggctgcgtaagcgccatctcagcgatacctcccagcgcggtgataaccgttttgtgcgcgtgagctgggatgaagccctcgacatgttctatgaagaactggaacgcgtgcagaaaactcacgggccgagtgccttgctgaccgccagtggttggcaaagcacggggatgttccataacgctagcgggatgctggcgaaagctattgccttgcatggtaatagcgttggtacgggcggagattactctaccggtgctgcgcaggtgatcctgccgcgcgtagtcggtagcatggaagtgtatgaacagcaaacctcctggccgctggtattgcagaacagcaaaaccattgtgctgtggggctccgatttgctgaaaaaccagcaagcgaactggtggtgcccggatcacgatgtttatgaatattacgcgcagctaaaagcgaaagtcgccgccggtgaaattgaggtcatcagcatcgatccggttgtcacatccacccatgagtatctggggcgcgagcatgtgaagcacattgcggttaacccgcaaactgacgtgccgctgcaactggcgctggcacatacgctgtacagtgaaaacctgtacgacaaaaacttccttgctaactactgtgtgggttttgagcagttcctgccgtatctgctgggtgagaaagacggtcagccgaaagatgccgcatgggctgaaaaactgaccggcattgatgccgaaaccattcgtgggctggcgcggcagatggcggcgaacagaacgcaaattattgctggctggtgcgtgcagcgtatgcagcacggtgaacagtgggcgtggatgattgtggttctggcggcgatgctggggcaaattggcctgccaggtggtggttttggttttggctggcactacaacggcgcaggcacgccggggcgtaaaggcgttattctgagtggtttctccggctctacgagcattccgcctgttcacgacaacagtgactacaaaggctacagcagcactattccgattgcccgttttatcgatgcgatcctcgaaccggggaaagtgatcaactggaacggtaaaagcgtaaaactgccgccgctgaaaatgtgtatttttgccggaactaacccattccatcgccatcagcagatcaaccgcattattgaaggcttgcgcaagctggaaacggttatcgccatagataaccagtggaccagtacctgccgctttgccgatatcgtactgcctgcgaccacgcagtttgagcgtaacgatctcgaccagtacggcaatcactccaaccgtggcattatcgccatgaaacaggtggtgccgccgcagttcgaggcgcgcaacgacttcgatattttccgcgagctgtgccgtcgctttaatcgcgaagaagcctttaccgaagggctggacgaaatgggctggctgaaacgcatctggcaggaaggtgtacagcaaggcaaaggacgcggcgttcatctgccagcgtttgatgacttctggaataacaaagagtacgtcgagtttgaccatccgcagatgtttgttcgccaccaggcattccgcgaagatccggatctcgaaccgctgggcacgccgagtggcctgattgagatctacagcaaaactatcgccgatatgaactacgacgattgtcaggggcatccgatgtggtttgagaaaatcgaacgctcccacggtgggcctggcagccaaaagtatccgttgcatctgcaatctgtgcatccggatttccgacttcacagccagttatgtgagagcgaaacgctgcgtcagcaatatacggtagcgggtaaagagccagtattcattaacccgcaggatgccagcgcgcgcggtattcgtaacggtgatgtggtacgcgtctttaacgctcgcggtcaggtgttggcaggggcagtggtttctgaccgctatgcacccggcgtggcacgaattcacgaaggggcatggtacgatccagataaaggcggcgagcctggtgcgctgtgcaaatacggtaaccccaacgtgttgaccatcgacatcggtacaagccagctggcgcaggcgaccagtgcgcacactacgctggtggaaattgagaagtacaacggaacagtggagcaggtgacggcgtttaacggccccgtggagatggtggcgcagtgcgaatatgttcccgcgagccaggtgaaaagttgaattaacccgcgtcgcaggtgaaatcatgaccacgctgacagcacaacagattgcctgtgtttacgcctggctagcgcagttgttctcccgtgagctggacgatgaacaactgacgcaaatcgccagtgcgcagatggctgaatggtttagcttgctgaaaagcgaaccgccgctcactgcggcggtgaacgagctggaaaaccgtattgccacgctgacagtacgtgacgatgcccgtctggaactggccgcggacttttgcggcctgtttctgatgaccgacaaacaagcggcgctgccgtatgcaagcgcctacaaacaggacgagcaagagattaaacgcttgttagttgaggcagggatggaaaccagcggcaatttcaacgaaccggcagatcatctggcgatctatctcgaattgctcagccatctgcattttagcctgggagaggggaccgttcctgcgcgaagaatcgacagtttgcggcaaaaaacactgacggcgctgtggcaatggttaccagagtttgttgcgcgttgtcgtcagtatgacagctttggtttttacgcggcactaagccagttattgctggtgttagtggagtgcgaccaccaaaacagataacgtcgtttgtgcgcctgaaaagacgcgtttagcgtcgcatcaggcattatggcgcagttgccggatgcggcgtgaacgtcttatccggcccacaggaactgtaatctttgtagaccggttaagatgcgtcatcgcatccggcaaacacacatcacggatgagctacaaaccgggaaagccgctggcgcagcaggcggttttcctgcttcaggtgcgcaatatcatccattaacgtcagcgccaccgcgatccccggccagtccagagccagttcatgacgcaggcgtaccgcgcgttgcaccacaatggcggcatggtcgtcaaatacccaggttgtttcctggatctcacgcggttcaaccacccccaaaccgacaatttcattcaactcctcttcagagatgccggtatgcaggcaaaattcggtaatagtaaaagtcaccgtaacattagccattatgctttcccccaatctttacgtggatcaaaagagctctgggcgtctgccagttgctgccacagcgcggcagtgttttcatccggtttcggcggcatcacgattttcagtaccgcatacagatcgccggtctgttttttgctcaccagacctttgcctttaacgcgcaatcgttgcccggcctggctgcctggcgggatagtcagcaaaatgctttctttcagtgttggaacggtgactttagcacccagcgccgcttcccacgggctaaccggcaccacaatttccagatcctggccgacaatatcaaacagcggatgtggcgcaatatgaatcaccagccacaaatcgccatttggaccgccgttttcgcccggcgtcccctggcctttcagacggatgcgttgaccattgccgacgcccgccgggatcttcacattcagcgttttcggaatttcctgttcgatcatgccaaaggcgttataaaccggcaggttatagctgatggtacgcttatgctcagtaagcgtttcttcgaggaataccgccacttcgatttcaatatcgtggccgcgtgtggcggggcgttgacggctctggcgggcatgctgaccgaaaatactgctgaagatatcgtcaaaatcttcggcgttaaaactctgaccgtcgccatggtggaactgacggttaaattgcggatcgttgcgatgttgccacatctgatcatactcagcgcgacgttgttcatcacttaacacttcccaggcttcagcgacctctttgaagcgggcttcggcatccggttctttgctgacatcaggatggtatttgcgggcaagtcgacgataggcggtcttgattgtcttgagatcgtccgtcggtttcacgcccatgatggcgtaataatcctttaattccatagcgttatctcgcgtaaatcaacacaaattgaaggaacccctgtaaggtaactcctataagtgtagggtaatcctcaaaatttcatatgccaacacagaatatgttattgaaatcatcgcggagaggaggtcgccatcaagatgggttgctgaacatattttaaacaggtgaaaaagggtgagcgatttttgatagttgaaccaggcactttaagtttaactagggcgtcattatttattaaattttatagacgctatatatgggtagtaatatacatggaattagttgcactgcaaataattatttgaaacaggcctggaacgatataaaaaatgagtacgaaaaaaatcaaacatatagtatcacgctttttgaaaacacactggtgtgttttatgcggttatacaatgaactcagacgtaaagtaaatgaagaggatactccatgtctggaatgtgaaagtctagaaaaagaatttgaggaaatgcagaatgataatgatctaagtttatttatgagaatattgcgtactaatgatacacaaatttatagtggggttagtggaggtattacatatactatacaatatgttcgagatattgatattgttagagtgtccttgccgggcagagctagtgagtctatcacagattttaaaggttattattggtataactttatggagtatattgaaaacattaatgcgtgtgatgatgttttttctgagtattgttttgatgatgaaaatataagtgtccagccagagcggataaatacgccgggaatatctgatttggattctgacattgatttgtctggtatatcttttattcagcgtgaaactaaccaggcattaggattaaaatatgctcctgtagatggcgatggatattgtctgttaagagctatactggttttaaaacaacatgattatagttgggcgctggtcagttataagatgcaaaaggaagtttacaacgaattcattaaaatggttgataaaaaaacgatcgaggctcttgttgatacggcattctataatctcagggaagatgtaaagacgttatttggcgttgatctacaatctgacaaccaaattcaggggcagagtagtcttatgagttggagctttctgttttttaaaaaacaattcattgatagttgcttgaataacgaaaaatgtatcctgcatttacccgagtttatatttaatgataacaagaacttgcttgctttagataccgacacgagcgataggattaaagcggtgaagaattttcttgttgttcttagtgatagcatttgcagtttatttattgttaatagtaatgtggcaagtatctccttggggaatgaatcctttagtacagatgaagatcttgagtatggttatttaatgaacactggcaatcattatgacgtttacctccctcctgaactttttgctcaggcttacaagttaaacaataaggaaatgaatgcgcaactcgactatttaaatcgttatgcaatttaatggcaaaggcatatgctaaaaaccattgttattagtctcacacttttttattggtaaatattgtctctgtattggtaacgccgcagatattctgtttagccacaggtgcaattatcagcggcgtacgcgaggcaggggctaatcaggcatagtttgcgtcaaaccttgcctgtttttgaagatgtatatagaaaaacaggcgttcaacaagccattttgcgaacctgttcccggaaaaaagtcatatttctgtcacactctttagtgattgataacaaaagaggtgccaggaatgaacaaaacgctaatcgccgcagctgtggcagggatagttttactcgctagtaacgctcaggcacaaaccgtaccggaaggctatcagctacagcaagtgctcatgatgagccgccataacttacgtgcgccgctggcgaacaatggcagtgtgctggagcagagtacgccgaataaatggccagaatgggacgtccccggtgggcaactcaccaccaaaggtggcgtgctcgaagtgtatatgggccattacatgcgtgaatggctggcagagcaggggatggtgaaaagcggggaatgcccgccgccgtacaccgtttatgcctatgccaatagtctgcaacgtaccgttgcgaccgcacagttctttattaccggcgcattcccggggtgtgatattcctgtgcatcaccaggaaaaaatgggcactatggacccaacctttaacccggtgatcaccgatgattccgccgcattcagtgaacaggcggtggcggcaatggagaaagagctcagcaaactccagcttaccgacagctaccagctactggaaaaaatcgttaactataaagattcccctgcctgtaaagagaaacaacagtgtagcctggtggatggcaaaaatacctttagcgccaagtatcaacaagaaccaggtgtttccgggccgctgaaagtcggcaacagcctggtagatgcgtttactttgcaatattacgaaggttttccgatggatcaggtggcctggggagaaatcaaatctgaccagcagtggaaggtgttgagcaagcttaaaaacggctaccaggacagcctgtttaccagtccggaagtggcgcgcaatgttgcgaaaccgctggtcagttatatcgacaaagctctggtcaccgatcgcaccagcgcaccgaaaattacagtgttggttgggcacgactccaacattgcctctctgttaacggcgctggatttcaaaccgtatcagttgcatgaccagaacgaacgcacgccgattggcggcaaaatcgttttccagcgttggcatgacagcaaagccaatcgcgatttgatgaaaattgaatatgtgtatcagagtgcggaacagttacgtaatgccgatgcgttaaccctgcaggcacctgcgcagcgtgtgacgctggaattaagcggttgcccgatagacgctgatggtttctgcccgatggataagtttgatagcgtgttgaatgaagcggtgaaataacagaaaactcccccgcgagaagcgggggagtcgctggttaaacgtttttacgttcgatggtctgttcgccccaaaaaaggctatctttatcggtcttagcaaaggctttgactaacacttcatcactaccttcttcccaaatcttttccgccattttttcgtcgtacccggcgacttcgaaaatggcctcggctatttccgggctcgtattgcgcagagatgcccattcaccgacgtgatgagctttcgcttcttgagttggcatgcgtatcctcctgttgaagattagccgttaagtttaactgccagacctgcgacatattccccttgataacgagcaatagacagttcttcctggctgggctggcgactaccgtcaccgcctgcgatggtggttgcgccgtacggcgtaccgccgcgaacctgactaacgtcaaataattcctgcgctgcgtagccaatagggacaattaccatgccgtgatgcgcaagggtcgtccaggtggatgtgatggtttgttcctgaccgccgccagtaccggtggaactaaagacgctcgccagttttccgtatagtgcgccggaagcccacaggccgcccgtctggtcgaggaaggtacgcatttgaccggacatgttgccaaagcgggtaggtgtaccaaaaataatggcgtcgtaatcggccagttcttgcggggttgcaaccggtgcagtttgcgttttaccgcctgctttttcaaataattgcggcggcatggtttccggtacacgcttaacgacaacttcagcgccatccactttgcttgcaccctcagcgactgcgcgtgccatcgtttcaatatgtccgtacatggaataataaagcaccagaactttagccatttctaaccactcctcgtgttatctctattccgtagcgattcgctaccacttatttaaagataagacgtccttttcagagtgcaaatttcacaaccacttatttgatttataacaactttcacaagcacgtaattttgtcgcaaaatgacacatttttatctcatcgcgtttttttaatcataagagcggcttatggataattattggagatgatatctattctcgctaagaagctgttgcaggatattaccaaacgcgggtctgcccgcgtcagttcactaagcttagtcccacgtagcgaaaatatggcagccgccatacgccgcgttaattctatgcaatatgatgtctatacccagacggaggtcagtaatggcaaaccatcgaggcggttccggcaattttgcagaagaccgcgaaagagcaagtgaagcaggtaaaaaaggtggacagcacagcgggggtaatttcaagaatgacccgcagcgcgcatctgaagcaggtaaaaaaggtggtaagagcagtcacggcaaaagcgacaactaaccgggctaatcaatgacgaatgcatttttgtctgtagctcgtcaaaaagccatcaccgccggttacccggtggttgatactgatgacaaatgtaagcttgcctgatgcgcgatgcttatcaggcctaccagaagattgcaatatattgaatttgcactgttttgtaggccggataaggcgtttacgccgcatccggcatgaacaatgcgtacgttgtcaacaatctgcaccgccggtaaccccggcggttttctgtttatggctcctgatgaacaacttctggcggtggaacgtcaaccaactttctgcttaacaacgcattgagtaaaatcgcgccaaaggttgctgtaccaatccctcccaacgtaaaaccgcccagcgtgagagcaaaatcacccgcgcccagcactaaggttactgcgaccataatcaaattaccgttctggcttaaatcgacacggttttgtacccatatccttgcgcctgcgacggcaatcagcccgaacacaacaatacttgcaccaccaataaccgcggccggaatggtatgaatcagcgcaccaaatttcggactaaagcccaacagcatggcgatgacggcagcagcaacaaacaccagcgtgctgtagactttggtcacggccatcacaccgatattttcagcataggtggtcacgccgctaccgccgacagagccggaaagcatcgttgccagaccatcgcctacgaatgcccgccccatatacgggtccatattgcgtccggtcatcccggcgactgccttgagatgacctaagttttccgccaccagaatcaccgccacgggcgcaatcagcatcattgcctgaccattaaaagcaggagtggaaaaatgtggcagaccgaaccaggcagcatggctgacgagagtaaaatcgacggcttttcccagccctaaaacgttggtcatcacgccatacagcagacaggcgacaattaatcctacgagaatcaataaccgctggatcatgccacgggtaaacaccgccaccagcccaatacacagcaccgtcattaccgccatccagctatcaaaggcgctagcgcttacacttttcactgcgataggcgctaagttcaggccaatcgccatcaccaccgcacccgtcaccaccggcggcatcagtcgttcaatccagcgcgtaccgattttcatcaccaccaggccaatgacggtataaaccagcccacaggcgataatcccgcccagcgcaatgctgatattcgggttaatgccctgaccgttaaagcccgtcgcggcgatcaccacgccgacaaaagccgcgctggagccgagataactggggacgcgcccgccggtaataaagaaaaacagtaacgtgccgatcccgctcattaaaatggaaagattgggatccagccccatcagaatcggcattaacaccgtcgcgccaaacatcgccaccgcgtgttgaacgcccattactgccgtctgagcaaacggcaatcgttcatccggcgcgaccacgccgctctctgtagaggtgctttttaactgccagtgaggaaaaccgaacattgccatcagctgtctccttaaggaggttaacaagcagggcgcatcagcgcgtgataactgcgatcgaaccacaccagcccgtagggtgtggtgtgacgatgaatcgcttcgatggcgcaaaacagaatgtcgtgggtgccgacgctcaccacctggctgatacggcagtcaaagctaaccagagcctcttccagttgcgggcatccggtcacccccgtctgccagcgggcggcggcaaagcggtgttccatgggcgttttgccgccaaaaaggttactaagcggctcctgcccggcgctaagtgtatttacacacagcgttcgattttcattgaatgccggccagacggacgccccacgattcaggcacaccagtaatgtgggcggcgtatcggtcacactgcagacggcgctggcggtgaacccggcgcgcccggctggaccgtccgtggtgataatattgaccgccgcgcccatgcaggacatcgcatcgcgaaaagtttgttgatcgacaatgttcatagtttgctccttacaacagcccgcaggcttcttcaaaggacagacgtggcaggcgcgcataaagcttgctgctatcgccatagccgatattaatcagcagattgctcttcagcgtgctgcccgtaaaaaaggcgtcgtccacgtgttgacggtcaaagccgctcatcgggccggtatccagtcccagcgcccggcaggcgacgatcagataggccgcctgcatggaactgttgcgaaacgctgtttcttcggcaagttgtgggctggaggtaaaccaactgcgggcatcaccgtggggaaacagtagtggtaaccgttcataaaattcactgtcccaggcgacgatagcggtgacgggcgcggtcagggttttttgcagattgccgctggaaagtgccgggcgcagacgttcttttccttctgccgtgcgggtaaacacgatccgtgccggagaacagttagcacttgtcggcccccatttcatcagggcataaatctcccgtaacgtctcatcgctgacgggtgtctcccgccagccgttgtgagtgcgggcatcggtgaacagggtgctaagcgcacctgggctaacggcttcgttcatagcaattccttacagggcggcttcacggtgatgtaacaggctggcaagcccgttgagtaacagagcattaaacgtttcgggatcggtcacgttgcaggcgtgtccgccatagggcatcaccattttctggctatcgggcagggcggcatgaagttcactggaacatgctgttggcaccagcagatcatcactggcgcagatgatttgcaccgggcagcggatgcgatccgcatggtgactaaagtcagcgcgtttgagggcgttaagtcgacgcagtaaattatttttgccctgaaaatgcgccagtgccagcgcgtcttctgcctccaggcgaggtgcgcgggccgccatccagtcggcgggatagaggaacaacggctgcgcttccacccatgcctgcgcgccgccgctatacagtaatcgttcgcgaacctgaaaacagcggcgcgtatgggcgtttattcgtagccagccgttaacgctgatcagcacagttacgctcgcgggataatccagcgccagctgcattcccaccagcgcaccgagcgcatggccgaccactgcgtaatgctcaatccctgcggctaccagcgcctgatgcagttccgctgccatctgggcgatactgtaatcttctgccagcgtgtcgggattattgccggtgccgcgctggtcgtaacagactacctgatactcctgctccagcaccgccagttgcggtaaccagtaactgccgctacccccaagaccgctaatcaacaccactacgggcgcatcagcataagggggaggactgagactaagtttcatcgcggcctcacttggcgatatgcgcaattgtggcgatttccaccagcgcgtcaggttttaccagtccgcactgaatgcagaatcgcgccggtttatcacccggaaaaaactcggcgtagatttcgttaatcgcggcgtaatttttccagtcggtaataaagatgctgttgaaggtcacatccgccatcgtgccacccgccgtctcgatcaccttgcggatagtttccagaacgtggcgggtttgcgcctttgggtcatcggcaaacagcacgttattatgttgatcaaaagccagcgtaccggagacatacaccacgccatcagccagcgtgccgggaacgaagggggccagcggtgcgctgctgccagcgggaataattacggattttggcatcgttaaactccttaagcgatatgagcaaaggacgtgggagaaagcgcgtcgcagaatgtttcgacgtcgctgacccagccaaaaaaggtttcgatattgaacaacgcggctttctgcgcaaatttcggccccgcctggtgagttgcgtcttcaagcaccacgccgaaatactccagaaaaaagccgtcgcgtagcgtgctttcgacgcagacgttggtagcgatgccggtgaaaaccagatggcgtattccgcggctgcgcaaaatgctgtccagcggcgtattgaagaaaccgctgtagcgcggcttcggcagcacaatatcgccaggctgcggcaccagttcatccaccagttgataatcccaggagcctttcgccagcaatttcccctgcagctgcggctgcttacgcatggttttcagggcgttgcttttatgaaaattcggactgccgggtccgccagcctcgacatactgttcatcccagccattttgaaaccagatgatcagcatccctgccgctcgcgctgcggtcacggcggtttgaatgttggcaatgaccgggcgagtggtactgacatcaaacccggcgagatctaagtagccgcctggcgtggcataagcgttttgcatatccaccacgatcagcgcactttgctgcggatcgaaggtaatggcttccggtcgagcggttaaggtcgtcatcatgccacctcctgagtcagcgcaggtagatgggcgcggcattgcatcagtggttgaatgcgctcgccgaaggtttcgattccgctcagaaaatcgtcgaaggttaacagcacgccttcggcaccaggcacgcttgcgacttcatctaacatgcgcgcgacactggcgtaagaaccgactaacgtccccatattgatgtttaccgcgctagtgggatcggccatctgacgaacgttggtgtcagtaccggagcgggtatctttctgactttgttcggttagccagcttaacgcctcttcatccgcgcccgctttgtagtgttcccatttggcgcgagcggcatcgtcggtttcatcggcaatcaccataaacaacacataagagccaacgtcgcgtccggtttgctctgcggcctgtttcatccgcgcagcggtcggggcgaaagccgtgggtgtatttacgcctttgccgaaacagaagttgaaatcggcataccgggcggagaacgccatgccagcgtcgctttgcccggcgcagatcactttcatggggacactcggttgcggactcacgcgacaatcattcatggtgaaaaaatcgcctttaaaatcgcttttccccgtgccccacaggtcgcgcagcacctgaacatattcggtgagatagtcgtaacgacgggagaaatagtcatcgccaggccagatacccatctgctcatactcgggcttttgccagccagtcacgaggttgacgccaaaacgcccgccagagatggagtcgatggttgcggccatacgggcgacgattgccggaggtaacgttaaggtggcagcagtggcgtaaatctgaatgcggctggtcacggccgccagccccgccatcaaggtgaagctctcaaggttgtgatcccagaactcagttttgccgccaaagccacgcagtttgatcatgctcagggcgaaatcgaaatggtagtgctccgctttttgcacaatggctttattcagttcaaaggtcggcatgtactgcggcgcgtgggtgctaatgagccagccgttgttgccaataggtacgaatacgccaattttcatcatcaacctctcttcgtctcgtaaagtgaaagtcagacggggcgctgcatcctgcatatccttttcagccgcgtattggcttgtttgcaaagcggatgccagtttttaaaaagttaatgttattaatctgttaacattacgttatctaaaatatctggtaaaaagtggactaaacggtcaaaacagttgcacataaaacatgcatctgtgcgcgatgagagtgcagaaggtcgaggccgggcgggggttttgctatcctgttgccaatctacaagaggggagagcgcatgacgcaaggcgcagtgaaaacaacgggtaaacgtagccgcgcagtaagcgcgaagaaaaaagcgattcttagcgcagcactggacacttttagtcaattcggttttcacggcacaaggctggagcagatcgcagagttggcgggtgttagtaaaaccaatctgctgtattactttccgagtaaagaggcgctgtatattgccgtgctgcggcagattctcgatatctggctggcaccgttaaaagcgtttcgtgaagatttcgccccgctggcggcgatcaaagagtacatccgtctgaagctggaagtcagtcgcgattatccgcaggctagtcgcctgttctgtatggagatgctggcaggcgcgccgctgttaatggatgaactgacgggcgatttgaaggcattaattgatgagaaaagcgcgctgattgccggttgggtcaaaagcggcaaactcgcgccgattgatccgcagcatttgatttttatgatttgggcttccactcaacattacgccgatttcgcccctcaggtggaggcggtgacaggcgcgacgttgcgcgatgaggtatttttcaatcaaacggttgaaaacgtgcagcggattattattgaggggattcgaccacgttaaagatgccggaggaggttgtaacatcctccggctacctgtttaacctatagtcattaagctggcgttaccgccagcggcagcggtattcacactcaggctacgctcgatatacagccgttccagaaggatattgctttcgccacgggcaaaaccctgcacgctaacaattgtgccatcccgcgcggcaactgcttcacacaatgcgcgaagctgatcgctatcaccgtggaagatcaccgcatcaaacggttgagcggttatattttccgctttcgccagttgaatacgttcgctgactgcgcttggcaatgccttcactaactgacgatgcagcgcgtcatccggccacagtacctggctgcccaccgccagcacggcggcgagctgagtcagcgcatcctgctcatcatcggcaatacacaacacgcgctcacgcggcagcagcgtccaggtgttgcgttcacccgtcggccccggcagcaatcgttgtgttcctgcctgcgccagctcgccatattgcgtacataacgcctgcaattctggacgatttgctgcccattcccgcagtgcatttagcggctgagtcaatgcggctttcaactgcgcatcgaccggatactttgcatcctgacgcgcgagcgtcactgccagcgcactttccgggcgattcgccagcagacggtagagatagagcggaccgcctgctttcggcccggtaccggacaacccttcgccgccgaacggctgcacaccaaccactgcgcccaccatattacggttaacatacaggttaccaacatgggcgctgccagtgacctgggcgatggtttcatcaatgcgcgtatggacgccaagcgtcagaccataaccggaagcgttaatctgctcgatcagctctggtagctggttacggttgtaacgcaccacatgcagcaccggaccaaagacctctttttgcaattcggcaaagtcatccagttcgatcagcgtcggggcgacaaaggtgccgctttgccattcacgggcatcttcgctgttttcccgcaccgcctggaacaccggacggcctttgctacgcatggtctgaatatggcgctcaatattggctttcgcttcgctatcaatcactggaccgatatcggtggtcaggcgacccggattacccatccggcattcggccattgcgccgcgcagcattttcaacgtgtggtcggcaatctcatcttgcaggcacagcacgcgcagcgcgctacaacgctgacccgcactgtcgaacgcgctggccagtacatccacgacgacctgttcggtcagtgcactagaatcgacaatcatcgcgttcatgccgccggtttcagcgatgagcggaatagggcgaccctgagcgtccaggcggctggcgatattgcgctgcagtaacgtagcgacttcggtactaccggtaaacatcaccccgcgcacgcgatcatcacccgtcagttgcgcgcccacggtttcaccccgacctggcagcaattgcaccacgcctggcggtacacccgcttccagcaaaatggcgatcccttgcgcggcaatcagcggcgtttgttctgccggttttgccagcacgctgttacctgccgccagtgcggcggcgatctgcccggtgaaaatagccagcgggaagttccacggactgatacacaccacaggccctaatggacggtgggtttcgttagcgaaatcatcccgcacctgtccggcgtagtagtggagaaaatcgaccgcttcgcgcacttcggcaatggcgttactgaaggtttttccggcctcacgcaccagaataccaatcagttgctgcatctggctttccatcagcacggcagcgcggtgcaaaatcgctgcgcgttcagccggaggcgtggcaaaccagattggcgcgttattaaccgcactttccagcgcctgttctacttcacgcggcgtggcttcacgcacatagcccacaatatctttcggttccgcagggttaataacggggctcatctcacctgccgctaccggttgttccagcattggcaaggcctgccatttttgcagtgcactattgagcagggcagaggagaggctggccaggcggtgttcgttagcgagatccagccctgcgctgttgtcgcgcccgtgaccgtaaagatcgcgcggcaggggaattttcggatgcggtaatccagtttgcccttcctgttgcgccagtttttctacagcagtgaccggatcggcgaccagttcatccagtggcaaagaggtgtcggcaatacggttaacaaagctggtgttagcaccgttttccagcaggcgacgcaccagatacgccaacagcgtttcatgtgtgccaaccggagcataaatacgacacggacggttaagtttgccgtcggcaactttcccggggacctgctcatacagtggctcgcccataccatgcaggcactggaactcgtactgacccgggtagtagttctgccccgccagttgataaatcgccgccagcgtatgggcgttgtgcgtcgcgaactgcgggtagattagattcggcaccgccagcagctttttcgcacaggcgagataagaaacgtcggtatacaccttgcgggtataaaccggataaccttcaaggccgtccatctgcgcacgcttaatttcactatcccagtacgcgcctttcaccaggcgaatcatcagacggcgacggctgcgggtggcgagatcaatcaggtaatcgatcaccaacgggcagcgtttttgataagcctgaataacaaaaccgatgccgttccagcctgccagttccggctcgaaacagagtttttccagcagatcgagggagatctccaggcgatcggactcttcggcgtcaatgttgataccaatatcgtactgacgcgccagcagggtgagacttttcagacgcgggtaaagctcttccattacccggtcatactgggcgcggctataacgcggatgcagcgcgctcagtttgatactaatgcccggcccttcatagatgccacgaccgttagacgctttaccgatggcgtgaatcgcctgctgataggaaaccatatacgcctgtgcatctgcggcggtcagcgcggcttcgcccagcatatcgtaagagtaacggaaacctttctcttccagcttgcgggcattggctaacgcttccgcgatggtttcgccagtgacgaactgctcacccatcaggcgcatcgccatatccacacctttgcggatcagcggttcaccgcttttaccgataatgcggttcaggctgcgggagaggctggcttcgttatgggtggaaaccagtttgccagtaaacagcagcccccaggtggcggcattaacaaacagactcgggctacgaccaatgtgactctgccagttaccgttgctgattttgtcgcgaattaacgcgtcgcgggtggctttgtcgggaatacgcaacaacgcttccgccagacacatcagcgccacgccttcctggctactcaggctaaactcctgcaataacccctggaccatacctgcgcgaccactggcatttttttgattacgcagtttatcggccagctgatacgccagtttgtgcgcctgttcagcaactggctgcggcaggcgggcttgttccagcagcatagaaaccgcttcggtttccgggcggcgataggccgcggtgatcgcggcgcgggaaacgctctggggcaatatttgctcggcaaagtcgaggaatggctggtgtggttcctctgccggagtcggtgcttcatcgctctcattggccgcgccagaaagcagcgcaggtagctccggcagagtatcgctgttttccagttgttcgagataagaaaaaatcgcctgcttaattaaccagtgtggtgtgcgatcgatacgtgtcgcggcagacttaatacgctcacgcgtcgcgtcgtccagcttaacccccatggtggtggttcccatgccattactcctgttgttcagaaaggtgcaacttaacgttatcgtgaaatatccatgatgttgcaactttgtgcaaccatgttaaatgtgacatgcgtagcaagcttaaaaatgaatgaaatgttaataaaagaaatcgatatgacagggattaaaaaaataactcagactttttctctgcggcagttaacatttttgaaaggtgcaaccgcaaaaaatgtgagagagtgcaacctgatgaaaaatagtgtcgctgagcactaaaatttaatgtaaatggtgtgttaaatcgattgtgaataaccagcgcttccggcaggatacggtcgccctggtaaaacataaactctgttaccccgttccggtggcagatataacggcaagtttcgacattgccgataataattttttggagactttagatggctattagcacaccgatgttggtgacattttgtgtctatatctttggcatgatattgattgggtttatcgcctggcgaagtacgaaaaactttgacgactatattctgggcggtcgtagtcttgggccattcgtgacggcattaagcgcgggtgcgagcgatatgagcggctggctgttaatggggttgccgggcgctgtttttctttccgggatttccgaaagctggatcgccattggcctgacattaggcgcgtggattaactggaagctggtggccgggcggttgcgtgtgcataccgaatacaacaataacgccttaacactgccggattatttcaccgggcgctttgaagataaaagccgcattttgcgcattatctctgcgctggttattttgctgttcttcaccatttattgcgctagcggcattgtggcaggcgcgcgtctgtttgaaagtacctttggcatgagctacgaaacggctctgtgggcgggcgctgcggcgacgatcctttacacctttattggcggtttcctcgcggtgagctggactgacactgtacaggccagcctgatgatttttgccctgatcctgacgccggttatcgtcattatcagtgtcggtggctttggtgacagcctggaagtgatcaaacaaaagagcatcgaaaacgttgatatgctcaaaggtctgaactttgttgccattatcagtctgatgggttgggggctgggttacttcgggcagccgcacattctggcgcgttttatggcggcggattctcaccacagcattgtccatgcgcgtcgtattagtatgacctggatgatcctctgcctggcaggggcggtggctgtcggcttctttgggattgcttactttaacgatcatccggcgttggctggtgcggtaaatcagaacgccgagcgtgtgtttatcgaactggcgcaaattctgtttaacccgtggattgccgggattctgctgagcgcaattctggcggcggtaatgagtaccttaagttgccagctgctggtgtgctccagtgcgattaccgaagatttgtacaaagcgtttctgcgtaaacatgccagccagaaagagctggtgtgggtagggcgtgtgatggtgctggtggtggcgctggtggcgattgcgctggcggcaaacccggaaaaccgcgtgctgggcttagtgagctacgcgtgggcaggctttggcgcggcgtttggtccagtggtgctgttcagcgtgatgtggagtcgcatgacgcgtaacggtgcgctggcggggatgatcatcggtgcgctgacggttatcgtctggaaacagttcggctggctgggactgtacgaaattattccgggctttatcttcggcagtattgggattgtagtgtttagtttgctgggtaaagcgccgagtgcggcgatgcaaaaacgctttgccgaggccgatgcgcactatcatagcgctccgccgagtcggttgcaggaaagctaagggacttagcctgcggcggttttgtttggcttcagcagcgggttgcgctcccttaatgtgcctcgccatataaattgaatggtgcagggagcgcgcagggggcggccaatcgccgccgccccctgctgtcccggccttcggggaacgcttcagcgattttgacgccaccaacacccgagctgttattatgttccgggcaaaaagttagatttgataatcgcggatggacgaaattgcttgatacacccgcttatcagttttacatggaagctctgatgcattgagtctggacagttttgtcggctggatacggcgtttacgcggcatccggcaagaacacatggttctttgcaaacaatcccatctttctaccctggaataatcgtttatatcccttggcattacctctctttgtttacattccaacatcattttataaacattccgcttgtgtttttctttgccgtaatgataatcgctatcactgcgatttacttttctttgcatagattgactcagaaaaacgtttaagggtgggtggcatgtttgttccgtttctcattatgttgcgcgaaggacttgaagccgcgctgattgtcagtttgattgccagctatcttaagcgtacccagcgaggccgatggattgtgtgatgtggattggcgtgttgcttgccgctgcgttgtgcctgggcttgggtatcttcattaacgaaaccaccggcgaatttccgcaaaaagaacaggaactgtttgaaggtatcgtggcggtgatcgccgtggtgatccttacctggatggttttctggatgcgcaaagtgtcgcgcaacgtcaaagtgcaactggaacaggcagtcgatagcgcattgcagcgtggaaatcatcatggctgggcgctggtgatgatggtcttttttgccgttgcaagggaagggctggagtcggtctttttcctgctggcggcatttcaacaagatgtcgggatctggccgccgctgggtgcaatgctcggtcttgctactgccgtggtgctaggcttcctgctctactggggcggtattcgcctcaatcttggtgcattttttaaatggaccagcctgtttattctcttcgtcgccgcagggctggcagctggtgccattcgcgcatttcatgaagccggattgtggaaccactttcaggaaatcgccttcgatatgagtgcggtgctctcaactcactcgctgtttggcacgctgatggaagggatttttggctatcaggaagcgccgagcgtcagcgaagtcgccgtctggtttatttatctcatcccggcgctggtggcatttgctctgccaccacgcgcaggggcgacagcgtctcgctccgcgtaacaaatacgacgcaaactcttgcttagttacaacatactttaaagggatagtctcgtcatgaccattaacttccgccgtaacgcattgcagttgagcgtggctgcgctgttttcttctgcttttatggctaacgccgctgatgtgccgcaggtcaaagtgaccgtgacggataagcagtgcgaaccgatgaccattacggttaacgccgggaaaacacagttcattattcagaaccacagccagaaggcgctggagtgggagatcctcaaaggcgtgatggtggtggaagagcgggaaaatatcgcccctggctttagccagaaaatgacggcgaatttacagcctggcgaatacgatatgacctgcggtctgctgactaacccgaaagggaagttgatcgtcaaaggtgaggcaacggcggatgcggcgcaaagtgatgcgctgttaagtcttggtggtgcaattactgcatataaagcgtatgtcatggcggaaaccacgcagctggtgaccgacaccaaagcctttaccgacgcgattaaagcaggcgatatcgaaaaagcgaaagcactgtatgcaccgacgcgccagcactatgagcgtattgaaccgattgctgaactgttctccgatctggatggcagcattgacgcccgtgaagatgattacgagcaaaaagccgccgacccaaaattcactggtttccaccgtctggaaaaagcattgtttggcgacaacaccaccaaagggatggaacagtacgctgagcagctttataccgatgtggtcgatttgcaaaaacgcatcagtgaactggctttcccacctagtaaagtggtcggcggcgcagccggactgattgaggaagtggcagccagcaaaattagcggtgaagaagatcgctacagccacaccgatctgtgggatttccaggctaacgttgaaggcagccagaaaattgtcgatttgctgcgtccacaactgcaaaaagccaacccggaactgctggcaaaagtcgatgccaactttaaaaaggtcgataccattctggcgaaataccgtactaaagacggttttgaaacctacgacaaattgaccgatgccgaccggaatgcactgaaaggaccgattactgcgctggcggaagatctggcgcaacttcgcggtgtgctgggactggattaagcgttatgcagtataaagatgaaaacggcgtgaatgaaccgagtcgccgacgtttactgaaagtgataggtgcactggcgctggcgggaagttgtccggtcgctcatgcacaaaaaacgcaaagtgcgccgggtacgcttagtccggatgctcgcaatgagaaacagccgttttatggtgagcatcaggcagggatcctgacgccacaacaggccgcaatgatgctggtggcgtttgatgtgcttgccagcgataaagccgatcttgagcggttgtttcgcttgttgactcagcgttttgcttttctgactcagggcggagcagcaccagaaacgccaaatccgcgcctgccaccactcgattccggcattcttggcggctacattgcgcccgataatctcaccatcacgttaagcgtgggtcacagtttgtttgatgagcgctttggccttgcgccacagatgccaaaaaagctgcagaagatgacgcgtttccccaacgacagcctggatgcggcgttatgtcatggtgatgtgttgctacagatttgcgccaacacccaggacacggttatccatgcgctgcgcgatatcatcaaacacacgccggatttgctcagtgtgcgctggaagcgggaagggtttatttccgatcacgcggcgcgtagtaaaggcaaagagacgccgattaatttgctgggtttcaaagacggcactgccaatcccgatagccagaatgataagttgatgcaaaaagtggtgtgggtaacggcagatcagcaggagcctgcgtggacaatcggtggcagctatcaggcagtacgcttgattcagtttcgagtggaattttgggacagaacgccgctgaaagaacagcagacgatttttggccgtgataagcaaaccggtgcgccgctgggaatgcagcatgagcatgatgtgcctgattacgccagcgacccggaagggaaggtgatcgcgctggacagccatatccggctggcgaatccccgcacggcggagagtgagtccagcctgatgctgcgtcgtggctacagttatagtctgggcgtcaccaactccgggcaactggatatggggttgctgtttgtctgctaccaacacgatctggaaaaaggcttcctgacagtacaaaaaaggctcaatggcgaagcgctggaggaatacgttaaacctatcggcggcggttatttttttgcgctgccgggggtgaaggacgcgaacgattatttcggaagcgcgttattgcgggtttaatgtttttaggcggataaggcatttgtgcgcagatgcctgatgcgacgcttgcgcgtcttatcatgcctacaatcagtgcgggtttggtaggctggataaggcgttcacgccgcatccggcgatcgtgcactgatgcctgatgcaaatcctgctgaaagcacacagcttttttcatcactgtcatcactctgtcatctttccagtagaaactaatgtcactgaaatggtgttttatagttaaatataagtaaatatattgttgcaataaatgcgagatctgttgtacttattaagtagcagcggaagttcccggcagtgatagtcagtcactatggagatcgcggatggtaacgtcctgtactggacatgttttagataatcaacgcgccaccactcgcggagttttctcctccggtagtcatctcgtcactttgcattttcaacctcatcctttctttagttgtgttaccgacgccgtaaacggtgcgcgtagccgttttagcgcattttatccaaaagcaaactatggcttacaaggaagccaaccctctgatgttcgtgcgcataatcgcgctgccaacggcgcgtgtgatgaatacaaacaactcaaggtgctctccatgggaagacaaaagcagtgatcaaagctcgtcgcgaggcaaaacgtgtgctgagacgggatagccgcagccataagcagcgtgaagaagaaagcgtcaccagccttgtgcagatgggcggcgtagaagccattggtatggcccgcgacagtcgcgatactagccccatcctcgcgcgaaatgaagcgcaattgcactatctgaaggctattgagagtaagcagctgatattcgccacgggcgaagccgggtgcggaaaaacctggatcagcgcagcaaaagcggcagaggccctgatacataaggatgtcgacaggattatcgtcacccgtccagttctgcaagccgatgaagatcttggcttcttacctggagatatcgcagaaaagtttgctccctattttcgcccggtctacgacgtgctggtccggcgcttaggggcttcctttatgcagtactgcctgcgaccggaaatagggaaggtggaaattgcgccgttcgcctatatgcgtggacgtacctttgaaaatgcagtcgtcattcttgacgaggcgcagaatgtgactgccgcgcaaatgaaaatgtttttaacccgcctcggggagaacgtgacggttatcgtcaacggtgatatcacgcaatgcgatttgcctcgcggcgtgtgctccggattaagtgacgcgctggaacgtttcgaagaagatgaaatggttgggatcgtccggttcggtaaagaggactgcgtacgtagcgcactttgccaacgtacgctgcatgcctacagttaagtgtgttatcggtgcagagcccgggcgaaccgggctttgttttgggtgttcccggtgtgtgcaatatacgaaaaaaaagcccgtactttcgtacgagctcttctttaaatatggcggtgagggggggattgactcgcttcgctcgccctgcgggcagcccgctcactgcgttcacggtctgtccaactggctgtcgccagttgtcgaaccccggtcggggcttctcatccccccggtgtgtgcaatatacgaaaaaaaagcccgtactttcgtacgagctcttctttaaatatggcggtgagggggggattcgaacccccgatacgttgccgtatacacactttccaggcgtgctccttcagccactcggacacctcaccaaattgtcgttcctgtcttgctggaacgggcgctaatttagggaaatcatgacctgaggtcaacaaactttttgaaaaaatcgcgcgtttattcaaacttcaatcaatgtgtggttttaataagcgaaatctgctttttttgccaccgaccacggatttgttatgctggtggcctttgtagatcataacgataagtgcgaataaatttcgcacaacgcttttcgggagtcagtatggatatcatcttttatcacccaacgttcgatacccaatggtggattgaggcactgcgcaaagctattcctcaggcaagagtcagagcatggaaaagcggagataatgactctgctgattatgctttagtctggcatcctcctgttgaaatgctggcagggcgcgatcttaaagcggtgttcgcactcggggccggtgttgattctattttgagcaagctacaggcacaccctgaaatgctgaacccttctgttccactttttcgcctggaagataccggtatgggcgagcaaatgcaggaatatgctgtcagtcaggtgctgcattggtttcgacgttttgacgattatcgcatccagcaaaatagtagccattggcaaccgctgcctgaatatcatcgggaagattttaccatcggcattttgggcgcaggcgtactgggcagtaaagttgctcagagtctgcaaacctggcgctttccgctgcgttgctggagtcgaacccgtaaaagctggcctggcgtgcaaagctttgccggacgggaagaactgtctgcatttctgagccaatgtcgggtattgattaatttgttaccgaatacccctgaaaccgtcggcattattaatcaacaattactcgaaaaattaccggatggcgcgtatctcctcaacctggcgcgtggtgttcatgttgtggaagatgacctgctcgcggcgctggatagcggcaaagttaaaggcgcaatgttggatgtttttaatcgtgaacccttaccgcctgaaagtccgctctggcaacatccacgcgtgacgataacaccacatgtcgccgcgattacccgtcccgctgaagctgtggagtacatttctcgcaccattgcccagctcgaaaaaggggagagggtctgcgggcaagtcgaccgcgcacgcggctactaataaagcatcaggattcctgctatccttggcgggaattgaatacaggagagagttatgtatcccgtcgaccttcatatgcataccgttgccagcacacatgcatatagcacattaagtgattacattgcccaggccaaacaaaagggcattaaactttttgcgatcaccgatcatggcccggatatggaagatgcgccgcatcactggcacttcattaacatgcgtatctggccgcgagtggttgatggggtagggatcctgcgcggcatcgaagctaacattaaaaatgttgatggtgaaattgactgcagcggtaaaatgtttgacagcctggatctaattattgccggttttcatgagccggtttttgcgccacatgataaagcgaccaatacacaagcgatgatcgccactatcgccagcggcaatgtgcatataataagccatcccggaaatcccaaatatgaaatagatgtgaaagccgttgctgaagcagccgcgaaacatcaggtggcgctggaaatcaataattccagttttttacacagtcgtaagggcagtgaagacaactgtcgtgaggtagccgcagcggtacgtgatgctggaggttgggtggcattaggcagcgattctcacaccgcgtttaccatgggggaatttgaagagtgtcttaaaatcctcgacgcggtagattttccgccagagcgcattttgaatgtttctccgcgccgcttactgaacttccttgaatctcgcggtatggcaccgattgcggaatttgcagacctttaattactagtaatggaaatatattaatgaacgagttttctatcctctgtcgtgtgctgggtagcctctattaccgccaaccacaagatcctttactggtgccgctgtttaccctgattcgtgaggggaaactggctgcgaactggccactggagcaggatgagttgctgacacgtttgcagaaaagctgtgatatgacgcaagtctctgccgattacaatgcgttgtttatcggcgatgaatgtgctgtgccgccatatcgtagcgcatgggttgagggcgcgacggaagcggaagtgcgcgcttttctttctgagcgagggatgccattagcggatacgccagccgatcacatcggcacattgctgctcgcagcttcctggctggaagatcagagtacggaagatgagagcgaagcactggaaacactgttcagtgagtatctgttaccctggtgtggtgcgttccttggcaaagtggaggcccatgcaaccacgcctttctggcgcaccatggcaccgctaacccgcgatgccattagtgcaatgtgggacgagctggaagaagattctgaagaataagtgtgatctacgtcactcataactgcaacggataatttgttgttgcataaaatgtgtgctcgatctcattcatggccgcgttttctgctatcatgcgcggcatgaacatacttctctctattgcaatcacaacaggcattctctccggtatctggggatgggtggctgtttccctgggcttactaagctgggcgggcttcctgggctgtacggcctactttgcctgcccgcaaggtgggctgaaagggctggcgatctccgctgcaaccctgcttagtggcgtggtgtgggcgatggtcattatttacggtagtgcactggcaccacatctggaaattctcggttatgtcataaccggtattgtcgcgtttctgatgtgtattcaggccaaacagctgctgcttagttttgttccggggacgtttataggcgcatgcgcgacgtttgccgggcagggtgactggaaactggtgttacctagcctggcgcttgggctgatatttggttacgcaatgaaaaacagtggcctgtggctggcggcgcgtagtgcaaagacggcgcaccgtgagcaggaaatcaaaaataaagcgtgaggggcactcacgctttcgcttaaacagtaaaatgccggatgataattccggcttttttatctgtcaggattccggtggaacgctcatatggcggtatttcaccagaatgtcattctgccgttctgctttattttgcaaatcccacagaccacggtcgataccatcattaatcaggaaaatgacccctgtttcgatagcgctcatcaggcacagcataacaggttcgttgctggtgtaacccacttccccttcaagcaagcgctggtagtcaataaagcggaaaaccccggcctgaacttcataggaaagtatcgtcttactggtgttcacgctagaaaggatctcgccggtactcacattgacgacgcgcaggttcacggcaatctgatcgagctggtattgcgtgtcggcaccgatgccaaaatatcttgccccaaccccgccagatttgacgttgctttcataaccgataatgctaccttcaaccatgatatttgccgccgttaaagattgcagcgggattcggttattaatggcaaccgtgccgttttcttgtgccgcacgaataatcttgcgctcgttaagcaggttttgtaagccctggcgctccagcggtataaaccagcgagaatctttcagtgccgtgaccagcattgccgtggcgctttgcggaacagcagtggagaagttacttgccgggtagggtttaaattgcccggtttcgtcctgaatgttgtatacgctaacaaagattttacccgtcggcgctggcagatgggtcaaatctttgtagctctgagcacgaggcattaatgtcggtctggcggcttctttaggcggggcggttaagcatccgctcagtaacatgacggcaaccaaaagaaataagcgctgcatgattattttccttatgaagctggggcttaaaaatcggtactgttattttgtaaaccgctaacctggatggtgctggtttgtccggttttacgatctgtcacgttcaactgcaattgaccatcgcggttggcaatatcgacaatataatcgttggtcaccatgcggcccggtttaccggtattaatattgctcagtagcccacctaaaatttgactctggatggcctgagtaaagttatctaacgcactgggtgtttcaataccaaagtcatcgttatagctcggatctttataagagttttgggcctgagcgctatttaataaaaaagcgccattatttgggttaccaccaaagtttggattacggaactggaaagtcatggttccagcccaacttaatgggctaataagcatgagtagaactactgcatgtttgacacgcattgcagcctccgaacaattttttatttagaattcatcatgcgccaaatcgcccgtacttaataacgcctgatttatctggcgacgatttagtgcttcttcagtttgaatcagtgcaaagacgacagttttctcgaagtctcttttcaacggaaataaaaaagtctggaaaataacgtcctgattgaccgttatagtgatccagcttccccatcgtgcactgggcctttcattaatcgttaagttacccgtatagtcactttcccatttatcactaaaggctcggtaaaaatcatggccaatagaactaacagtatggtcagttagcaatcccgggacttctacctcaacggcgtgaagattccctgcggcgaacagaaattctgccgccacaatccagcgtaaataacgtttcatggctttatcgcctgaggttatcgtttgcccaggaaaccgcttgtgtccggttttttacggctatcttcttgaaaagattataaagatgcgttttaaccgtattttcgctgatgaacaagctacgagcgatctcgttattagacgcgccgatacgcagcttattcaggatctctttttcccgatgagtaaggagggcactttccgtgctgttataacgatagttaccactatgcgtaatcaggtagctggcaagcttttgcgtaaagtagcattcgccgcgcaggacgccttgcaacccattgacaacacgttcttgatcctccatggaataaaaaacgccgttgatatgaggccagttttcaatgtcgcggtacgggtaatcttcaggcgtatttagcaacaatattttgatattgttgtttttcctgctcaaagtatcctgccaataatggataagctttttatccgcttccatcatatccagaagaataatagagccactagagatatcgtccagagaacgttgaatattatgtaattttcctgtaattgccaggctttgtttaaggtgctgcaagagagctgtcgcctgcaaagaagatttagtgatcaacaataatgtatgaccatgaatactatggacttcattaaacatgatgaaaccccgctttttttattgatcgcacacctgacagctgcctctaaaatagaagcaccagaagtactgacagatgttgcactgctgtgtgtagtaataaatcagccctaaatgggtaaaatataaaactaatggattacatctgatttcaatctagccattacaaatcttaaatcaagtgttaaacatgtaactaaatgtaactcgttatattaaaatgttaaccttaaggttttattaagtttagaaatgatagaaaagttgtacatttggtttttattgcacaattttaaaaaatcatacaaatggtgataacttactaataatgcatataaaaaatatttcggtgtagtcctttcgtcatgtaaaacgttcttgttttttctccacacctccgtggacaattttttactgcaaaaagacgaggtttgtcacggcttgtgcgcaagacatatcgcagcaatcagcgacgggcaagaagaatgactgtctggtgctttttgatagcggaaaacggagatttaaaagaaaacaaaatatttttttgcgtagataacagcgtatttacgtgggttttaatactttggtatgaactaaaaaagaaaaatacaacgcgcgggtgagttattaaaaatatttccgcagacatactttccatcgtaacgcagcgttaacaaaatacaggttgcgttaacaaccaagttgaaatgatttaatttcttaaatgtacgaccaggtccagggtgacaacatgaaaaacaaattgttatttatgatgttaacaatactgggtgcgcctgggattgcagccgcagcaggttatgatttagctaatagtgaatataacttcgcggtaaatgaattgagtaagtctagttttaatcaggcagccataattggtcaagctgggactaataatagtgctcagttacggcagggaggcagtaaacttttggcggttgttgcgcaagaaggtagtagcaaccgggcaaagattgaccagacaggagattataaccttgcatatattgatcaggcgggcagtgccaacgatgccagtattagccaaggtgcttatggtaatactgcgatgattatccagaaaggttctggtaataaagcaaatattacacagtatggtactcaaaaaacggcaattgtagtgcagagacagagccaaatggctattcgcgtgacacaacgttaatttccattcgacttttaaatcaatccgatgggggttttacatgaaacttttaaaagtagcagcaattgcagcaatcgtattctccggtagcgctctggcaggtgttgttcctcagtacggcggcggcggtaaccacggtggtggcggtaataatagcggcccaaattctgagctgaacatttaccagtacggtggcggtaactctgcacttgctctgcaaactgatgcccgtaactctgacttgactattacccagcatggcggcggtaatggtgcagatgttggtcagggcagtgatgacagcagtatcgatctgacccaacgtggcttcggtaacagcgctactcttgatcagtggaacggcaaaaattctgaaatgacggttaaacagttcggtggtggcaacggtgctgcagttgaccagactgcatctaactcctccgtcaacgtgactcaggttggctttggtaacaacgcgaccgctcatcagtactaatacatcatttgtattacagaaacagggcgcaagccctgttttttttcgggagaagaatatgaatacgttattactccttgcggcactttccagtcagataacctttaatacgacccagcaaggggatgtgtataccattattcctgaagtcactcttactcaatcttgtctgtgcagagtacaaatattgtccctgcgcgaaggcagtagtgggcaaagtcagacgaagcaagaaaagacccttagtttgcctgctaatcaacccattgctttgacgaagttgagtttaaatatttccccggacgatcgggtgaaaatagttgttactgtttctgatggacagagtcttcatttaagtcaacaatggccgccctctagtgaaaagtcttaatttgttgaaatatcgagcataagatgaatctggagagaatggtctgctgcgaatcagccaacctgaaagtatggataacacaaccctcaaggatgactaatcattgaggaaatagaataaatgttcagaccttttttaaactctcttatgctcggcagtttgttttttccttttattgccattgctggaagcaccgtgcaagggggcgtgatccatttttatggccaaattgtggaaccggcatgtgacgtcagcacccagagtagtcccgtagaaatgaactgcccacagaatggttctattccgggcaaaacctactccagcaaagcgttaatgagcggcaatgtcaaaaacgcgcaaatagccagtgtaaaagtgcagtatcttgataaacagaaaaagctggctgtaatgaacatcgaatataactaagtttctgaacaactcacgttgctgagcagaaaaatgcgatttaaccaaaaagcctgctgtacacttaagaaacaagaaggtgtaaggaggcgttatgaaaacgcgtattcatgttgtgcagggtgatattaccaaactggccgttgatgtgattgtgaatgcggctaatccgagtttaatgggaggcggcggcgtcgatggggccattcatcgcgcagcgggtccggccctgctggatgcttgtttaaaagtcaggcaacagcagggcgattgccctacggggcatgccgttattacgcttgcaggcgatcttcccgctaaagccgtagtgcacaccgtcgggccagtctggcgtggtggtgaacaaaacgaagaccagcttttgcaggatgcctatctcaatagcctacgactggtggcggcaaacagctatacgagtgtggcttttcctgcaatcagtactggggtttatggttaccctcgtgcggcagcggctgaaatcgcagtaaaaaccgttagtgaatttattacccgtcacgctttacccgaacaggtatactttgtctgttatgatgaagaaaacgcccacctctacgaaagactccttacccaacaaggagatgaatgatttgccccggctggcgagcgcggtgctgccactgtgtagccaacatcccggtcagtgtggcctttttcctctggagaaaagtctggatgcgtttgccgcccggtatcgtctggccgaaatggcagagcatacgctcgatgttcagtattacatctggcaggacgatatgagcggtcggttactgttttccgccctgttagccgcagcaaagcgtggcgttcgcgtccgtttgttgctggacgacaacaatacgcccggacttgacgacattttacgcttgcttgacagtcatccacgcattgaagtccggctttttaatcctttcagctttcgcttgctgcgtccgcttggttatatcaccgacttttcccgtcttaatcgccgtatgcacaataaaagtttcactgtcgatggcgtggtgaccctggtgggaggacgaaatattggtgatgcctattttggagcaggggaggagccactttttagcgatttagatgtcatggcaataggacccgtggtagaggacgttgccgatgatttcgcccgctactggtattgcaaaagcgttagtcccttacagcaggtgctggatgtcccggagggtgaaatggcggatcgcatcgagttacccgcctcctggcataacgatgccatgacgcatcgttatttacgcaaaatggaatccagtccatttataaatcatctggttgatggaacattgccgcttatctgggcgaagacacgtttattaagtgatgatccggcgaaaggggagggcaaggcaaaacggcatagtctgttaccgcagcgcctgttcgatatcatgggcagtcccagtgaacgcatcgatattatctcttcctattttgtaccgacacgcgcaggtgtggcgcaactcttacggatggtgagaaaaggggtaaagattgcgatcctaaccaattctcttgccgctaacgatgttgctgtcgtccatgccggatacgcgcgctggcgcaaaaaattgctccgctatggcgtggaattatatgaactcaagccgacgcgtgaacaaagtagtacgttacacgatcgcggcataaccggtaattccggagccagcctgcatgctaaaacctttagcatcgatggtaaaacggtgtttatcggctctttcaatttcgatccgcgtagtacattgctcaatactgaaatgggcttcgtgatagagagcgaaacgctggcacagttaattgataaacgctttattcagagccagtatgatgcggcctggcagctccgtctggacaggtggggacggatcaactgggttgatcgtcatgcaaagaaagagattattctcaaaaaagaacccgccaccagtttctggaagcgggttatggtcagactggcgagcatattgcccgtggaatggttattgtaaatgtggcttaacgggctggtgctttatcgttctcacgcttaacaaccggtttaccagagaacaaaaacttcagtaacgggatgcgcaaatgaatttcatacagaattatcgcaatccctactacaaatatcaggccacagagaaaaccaagccagttggaggtgatgtgcggtgtaatgtatgcgccgaaaaacagcgttaacgggtggtgaaccagatagataaacaggcttgcgttaacaaaataagtcacccgcgcactctggaagttaagcaaacggtggccaaaggagaagaccacattcaccatccacagaccgaggaccatggtgatcacgctctcggtttcgtacatccaggcatcgccactgccatagcgctggttgagtaaataagcgacaaacgccaatgctgctgcaagggtacagccacgagacggcgtggtaaacaaggctttaagatgagggaaaatgaaagccagtgcgccgaggataaagaacggcaaataaaacagcgtttgcatgacaataaaattgaacatgccattactcagaatgggcggatacacaataaaaatcgttcttcttattaccgcataaccgatgccgaggcataaaaaaatcacgcttagttttaccatgctgaattttttattcgttttatcagaattttctaaattatttctgatgcgcttaaatatccatacgcacagcgtcgtcatgaccactaacaccagtaaaaaccacaggtgacttattaattcccaggccaacgtattatatttgtcatacaaactcagcccaggccaactttccgcttttcctttgacatattgcagcataataaattgcggtaatgtcagtagggggatggctgttaacatcgggatacctacacgttcgacacgtactttccaccattttttcaagggatagcgtaaaaaaagcatgtaggaaaagtagccggatataacgaaaaatacctgcatgcggaagctgtggatgaagtcattaaaaagggtcagccacaaactactttcggcgctattcacatgccatgtatggctgctatagattaaagaaatatgaaaaggtatccctaacaacatcagccaggcgcggatggagtcgaggaaatattcacgttgcgcgggtactgggttcatatatggttaactaatctcggatttttcgtcttatccctgtcgggttatgcctttaggcttgttgccatagtgacaccgacctgaccgcgccaggcgcaggcttcaaggtttttatgcatagcatcatcgctaccactaaccagaatggaagcgtctgtaagacggttgataaataaatttgctggcaaaccctacacgaagtcgatgcttctgtctttaggagaagcacggaaagtgaaaacggttgcaatcaggtgcttaatccatgagccagcgtgctgaacgataccgggattctgttgtcggaatggctggttatccattaaaatagatcggatcgatataagcacacaaagggggaagtgcttactaattatgaaacataaactacaaatgatgaaaatgcgttggttgagtgctgcagtaatgttaaccctgtatacatctagtagctgggctttcagtattgatgatgtcgcaaagcaagctcaatctttagccgggaaaggctacgagacgcccaaaagcaacttgccctccgttttccgcgatatgaaatacgcggactatcagcagatccagtttaatcatgacaaagcgtactggaacaatctgaagaccccattcaaactcgagttctaccatcagggtatgtacttcgataccccggtcaaaataaatgaagtgactgccaccgcagtcaaacgaatcaaatacagcccggattatttcactttcggcgatgttcagcatgacaaagatacggtaaaagaccttggctttgccggttttaaagtgctttacccgatcaacagcaaagataaaaacgatgaaatcgtcagcatgctcggggccagctatttccgcgtgattggtgcaggtcaggtttatggcctttctgcccgcggcctggcaattgataccgccttgccaagcggtgaagaatttccgcgcttcaaagagttctggatcgagcgtccaaaaccgactgataaacgtttaaccatctatgcattgcttgacagcccgcgtgcgacaggtgcttacaaattcgtggttatgccagggcgtgacacggttgtggatgtgcagagcaaaatctatctgcgcgataaagtcggcaaactgggggttgcaccgttaaccagtatgttcctgtttgggccgaaccaaccgagccctgcaaataactatcgtccggagttgcacgactctaacggtctctctatccatgccggtaatggcgaatggatctggcgtccgttgaataacccgaaacatttagcggtcagcagcttctccatggaaaacccgcaaggctttggtctgttgcagcgcggtcgtgatttctcccgctttgaagatctcgatgatcgttacgatctccgtccaagcgcatgggtgactccgaaaggggagtggggtaaaggcagcgttgagctggtggaaattccaaccaacgatgaaaccaacgataacatcgtcgcttactggacgccggatcagctgccggagccgggtaaagagatgaactttaaatacaccatcaccttcagccgtgatgaagacaaactgcatgcgccagataacgcatgggtgcaacaaacgcgtcgtagtacgggggatgtgaagcagagcaacctgattcgccagcctgacggtactatcgcctttgtggtcgattttaccggcgcagagatgaaaaaactgccagaggataccccggtcacagcgcaaaccagcattggtgataatggtgagatagttgaaagcacggtgcgctataacccggttaccaaaggctggcgtctggtgatgcgtgtgaaagtgaaagatgccaagaaaaccactgaaatgcgtgctgcgctggtgaatgccgatcagacgttgagtgaaacctggagctaccagttacctgccaatgaataagacaactgagtacattgccgaagactgatatccgcgccgttcatcaggcgctggatgccgaacaccgcacctgggcgcgggaggatgattccccgcaaggctcggtaaaggcgcgtctggaacaagcctggccagattcacttgctgatggacagttaattaaagacgacgaagggcgcgatcagctgaaggcgatgccagaagcaaaacgctcctcgatgtttcccgacccgtggcgtaccaacccggtaggccgtttctgggatcgcctgcgtggacgcgatgtcacgccgcgctatctggctcgtttgaccaaagaagagcaggagagcgagcaaaagtggcgtaccgtcggtaccatccgccgttacattctgttgatcctgacgctcgcgcaaactgtcgtcgcgacctggtatatgaagaccattcttccttatcagggttgggcgctgattaatcctatggatatggttggtcaggatttgtgggtttcctttatgcagcttctgccttatatgctgcaaaccggtatcctgatcctctttgcggtactgttctgttgggtgtccgccggattctggacggcgttaatgggcttcctgcaactgcttattggtcgcgataaatacagtatatctgcgtcaacagttggcgatgaaccattaaacccggagcatcgcacggcgttgatcatgcctatctgtaacgaagacgtgaaccgtgtttttgctggcctgcgtgcaacgtgggaatcagtaaaagccaccgggaatgccaaacactttgatgtctacattcttagtgacagttataacccggatatctgcgtcgcagagcaaaaagcctggatggagcttatcgctgaagtcggtggcgaaggtcagattttctatcgccgccgccgtcgccgcgtgaagcgtaaaagcggtaatatcgatgacttctgccgtcgctggggcagccagtacagctacatggtggtgctggatgctgactcggtaatgaccggtgattgtttgtgcgggctggtgcgcctgatggaagccaacccgaacgccgggatcattcagtcgtcgccgaaagcgtccggtatggatacgctgtatgcgcgctgtcagcagttcgcgacccgcgtgtatgggccactgtttacagccggtttgcacttctggcaacttggcgagtcgcactactggggacataacgcgattatccgcgtgaaaccgtttatcgagcactgcgcactggctccgctgccgggcgaaggttcctttgccggttcaatcctgtcacatgacttcgtggaagcggcgttgatgcgccgtgcaggttggggggtctggattgcttacgatctcccgggttcttatgaagaattgccgcctaacttgcttgatgagctaaaacgtgaccgccgatggtgccacggtaacctgatgaacttccgtctgttcctggtgaagggtatgcacccggttcaccgtgcggtgttcctgacgggcgtgatgtcttatctctccgctccgctgtggtttatgttcctcgcgctctctactgcattgcaggtagtgcatgcgttgaccgaaccgcaatacttcctgcaaccacggcagttgttcccagtgtggccgcagtggcgtcctgagctggcgattgcactttttgcttcgaccatggtgctgttgttcctgccgaagttattgagcattttgcttatctggtgcaaaggaacgaaagaatacggcggcttctggcgcgttacattatcgttgctgctggaagtgcttttttccgtgctgctggctccggtacgcatgctgttccatacggtcttcgttgtcagcgcgttccttggctgggaagtggtgtggaattcaccgcagcgtgatgatgactccacttcctggggtgaagcgttcaaacgccacggctcacagctgctgttagggttagtgtgggctgttgggatggcgtggctggatctgcgtttcctgttctggctggcaccgattgtcttctcgttgatcctgtcaccgtttgtttcggtgatttccagccgtgccaccgttggtctgcgcaccaaacgctggaaactgttcctgatcccggaagagtattcgccgccgcaggtgctggttgataccgatcggttccttgagatgaatcgtcaacgctcccttgatgatggctttatgcacgcagtgtttaacccgtcatttaacgctctggcaaccgcaatggcgaccgcgcgtcaccgcgccagtaaggtgctggaaatcgcccgtgaccgccacgttgaacaggcgctgaacgagacgccagagaagctgaatcgcgatcgtcgcctggtgctgctaagcgatccggtgacgatggcccgtctgcatttccgtgtctggaattccccggagagatattcttcatgggtgagttattacgaagggataaagctcaatccactggcattgcgtaaaccggatgcggcttcgcaataaaaacgtagttgcctgatgcgctacgcttatcaggcctacatcgttcctgcaatttattgattttgcaagactttgtgggtcggataaggcgttcacgccgcatccggcaaaaacaacgagccaataaaaataccggcgttatgccggtatttttttacgaaagaggtatcaaatgcgtttaattgtggtgagcatcatggtgaccttgctgagtggctgtggcagcattattagtcgcactataccggggcaggggcatggcaaccaatattatcccggtgtgcaatgggatgtgcgtgactccgcctggcgttatgtcacgatccttgatctgccattctctctggtttttgatactttactgctgccgatcgacattcatcatggcccgtatgagtgattaacgttcatcccactcatcagctgctgcgcgtccttcctcggtatccagcggtggctcaagctgaaattccccctcgtcccattcatgtaatgtattctcttcctgccactcctggcgtatctctatctcatcatagtcgccatcaaaaacactttgcgcggcttcaccgctaagcataggtaaacattcaccttcttccccttcgtcggcaaaaaactcaacttgccacatgatgtcgccgtcctgcaaaacgtatttttgggcattgaactgttgcacattcgcatcttcggcgtcgatgccggggttgtctgcaagaaattcttcgcgtgcagcgtcaatggcttcttcaagcgttgcgtacatggtcatcacgattctccctttgagttgatgaggtttcagggaaaaggatagctgattctccgcttttgcaagtatgaaaggcgaaaaatcagttgcttacctggggtattcgacgacgacgtagactgttccaactatagactgcgttgaataacactacgccagcggtgacgagaaataccgctctgaaaccgtagttcgcactaatcgctgctcccatcaatggtccggtaacgttgccaatatcacgaaagctttggttatagctgaagatacgcccggcgatctggttgctgctgttgtaaaccaacagtgtctgtacggcggggagtagtgcaccatcggcggcaccgagcaaaaaacgtaaaatcccaagttgcaatggcgtctgaacgtaagacattgggatcaacagcagtacagaaaagatcagcgctgtaatcaggatcttttcgggtccgattcgatcgccaagtttgccgagtcgtggtgcacttagcagagccgccacgcctggcacgctggcgatcatgccactgataaaggcgacgttactgacgttacccgccagttcgcggacatacagcgtcagaatgggggcaatactgcccgtcgccacctggatgattaacgtagtgacaaacaggctgagtaccagtttcgggtttttaagacttgtcaccacttcccgcatgtgcagcatctcttttttgctgaccggctggaatttttctctgatgcaaaacagggtgacgaaaaagcagagtatgagcacactggcggtaataaagaataccggacgtaagccgtagctatcggcgagcaggccgccagccattgggccgagcaacgcaccactaacgccgcctgtggagagcgtacccagcgcccagccgcttttattacgcggtacttgtgtggcgataagagcattagcgttggggacaaatccgccaagtaacccaagaagcgcccgcaggatcaaaaactgccagatattttgtgccagccccatcaacaccatcacgatgcccatgccgagggcagagcgtaatagcatgagttttcggcctttacggtcggcgagtccaccccaaaacggactggcgatggcgctaaataaaaatgtaatgctgaagacaataccggaccacatattcagggcggagtgaccggtaacgccaagctgctcaacgtagaggggtaagaagggcattaccagactgaaggcggcaccggtaagaaaacagcctagccaggcgacgatcaggtttcgtttccagtttataggggtgtcattttcacagggactcatagcaatccgctgttggtgcgccaggcgcggtgaacataagaagaaaagataagcacactaattatgcgcccgacttccagggggcgcaatccagagagcttttatcgctaaatcagggggatttgctgtggtaatgccggatgccattctgaagcatccggcatgggagatttaatagcgactaggaacgccttccgggcgtgttttaaagcgacggtgtaaccacatatactgctctggtgccatcatgatgcatttttcgaccactttgttcatccacgcggcggtagtttcggcatcatccagtggcggagaacactctggcggcagcataatcaattgataccctttgccatctggcttacggcgtggaacgaagggcaccagacatgcgccggacatccgtgccagcatccaggttccggtcgtggtcgcagcctgctcaacggcaaacaacgggacgaaaacgctactgcgcgggccgtaatcatgatccggtgcgtaccagaccacttcgccttttttcagggctttaatcatgccttttaaatctttgcggtcgagcatgcttttattactgcgcaaacggccccaggtttgtagccagtcaatcagtggattatcgttcgggcgataaacgccaatacccggttcctgcataccaaactgccgcgcacccagctccagtgtcagaaaatggatgccaactaacaggatgccgcgtttttgcgcctgcacgtcacgaatgtgttccatgccgatcacttccgtccagcgggcgattcggcggtccggccagaaccacgccatgccggtttccatcaggcccatgccaacggattcgaaattcttcaccaccattttacggcgttcttgttcgctcatttccgggaagcacagttccaggttgcgatgcacaatttttgcgcgtcgtttcataaaacgtaacgccagttttcctaatccacaaccgaggcggtagataaccgggtagggcaattgcacgactaaccaaagtacgccaatacccaaccaggttaaccaataacgcggatgaagcagtgcggtggagaacttgggtagattcgtcatatcaatcctgtttttcaacctattcgggcaattgtatgtattgtcgcattttttcgcccgcaaccaaaatttgtggctgaagactgggcgaaattgccgcgcttgtaaataacaaataatttttaatgcgcaaatgtagcgtaaaatgtgtggatgttaattatcgataattgctatatcatgccgcggatttttactttcccatctcgcaggaaccgtacaccatgccagtgttacacaaccgcatttccaacgacgcgctaaaagccaaaatgttggctgagagcgaaccgcgaaccaccattagcttttacaagtatttccacatcgccgatcctaaggcgacccgtgacgctttatatcagctgtttaccgcgctgaatgtttttgggcgagtgtatctggcgcatgagggcattaacgcgcaaatcagcgtacctgcgagcaatgttgaaacatttcgcgcgcagctctatgccttcgacccggctttagagggtttacgcctgaatatcgcgttggatgatgacgggaaatccttctgggtactgcgcatgaaggtacgcgatcgcattgttgccgacggtattgacgatcctcactttgatgccagcaatgttggtgagtatctgcaagcggcggaagtgaacgccatgcttgacgatcccgatgcactatttatcgacatgcgtaaccactatgagtatgaagtggggcactttgaaaacgcgctcgaaattccggcagataccttccgtgagcagctgccaaaagcagtcgagatgatgcaggcacataaagataaaaaaatcgtcatgtactgcaccggcggcattcgttgtgaaaaggccagtgcctggatgaaacataacggattcaacaaagtctggcatatcgagggcggaattattgaatacgcccgtaaggcgcgcgagcagggcttgccggtgcgttttattggcaaaaattttgtttttgacgagcggatgggcgaacgtataagcgatgagattatcgcgcattgccaccagtgcggcgcgccgtgcgacagccataccaactgtaaaaatgatggctgccacctgctgtttattcagtgtccagtatgcgcggaaaaatacaaaggttgttgtagtgagatttgctgcgaagaaagcgcgttaccgccagaagaacagcgacgccgtcgggcaggacgtgaaaatggcaataagatctttaataagtctcgtggacgtctgaatacaacactgtgcattcctgatccaacagaataaatatcattgccggatgcgtgccatccggcaacatttcacgcttacttctgctgtacgccttccacactaataatcagatccacttcctgagaagctggacctaaatctgtcttgatattgaagtccttgagcttaattttgccttcggcctcgaagcctgcacgtttaccaccccatgggtcgtcgccctgaccaattaatttcgcttccagcgtgacgggtttggttacgccattcagcgtcagatcgccggtaatatccagttcgtcaccgtctttcttcacgctggtggaggtgaatgttgcctgtggatattttgcggtattgaggaaatctgcactgcgaagatgtttatcgcgttcggcgtgattagtatcgacgctggtggtgttaattgtcacattcactttatcggcagccggatttttttcgtcaaaggtaaaagtaccgtcgaaatctttaaaggtgccgtataaccagctatagccaaggtgctggatgcggaaattaacaaaggcgtgctgaccttctttgtcaattttgtaatcggcggcaaccgcactaccggcagagaacatcagggacgcgaaggttaaaccaagcaggctttttttcattttttatactccatagtcagaactgctctttcccagcatgcgcttcagagtgtcgtctttatcgatgaaatgatgcttcagggccataaatccgtgcataacggacagtactacgacgctccacgcgagccaaaaatgcagggcaccggcaaagtctgcctgtgcgccagcgtcggcaagggtcgcggggacgtcaaaccagccaaaaacgctgatcggtttaccatcggcagtactgatcagatagccgctgatgccgatggcgaaaagcaataggtacaatgcgagatgtccagctcttgcggcaagacgagtcatggggctataactcggcagcggacccggcggtggagatatgacacgccacagaacgcgaataaccagccccatcattaacaaaataccgatgcttttatgcagttcgggtgctttgtgataccagccatcgtaataactgagcgtgaccatccacagacctaaagcaaacatgccgtagacaataattgcgcttagccaatggaaggccgcagatataacaccatagcgttcaggggtatttgtgaaactcataagtgcatccaaaacgaatttgcgagagaaagaaaatggcgtgtcggagaatgaattgcaacacaaaaataacaaattgaatgatatttatttttatttcaataattttgaattaataatgaaagaatcttcataagtttagtgggttcagcatcagagatgtctggtgagtgctgtagaagcaggaataatctcattcaatttttcacgctaaatgaaagggagattaaatatttgtcagtttatgtcagtgcggaaaattaaaaataaaacacatagatcagatccataattgccaacaatccccagagaaaaagataaagcatcagatgctcgcgaatattattgatgagatagtgcaacagccgacgcattaaatactcctgtaaaaacggcctcattctggaggccgtaatgatgattattggaagcgggaaagcctgaatggcgtcaaatcaaaatcgctttttttgtcttgcgcaaaatcggcagctatttcccctaaaacactcgcaaatttaaaaccgtgcccactcaggccggtaatgagcagtgtattatcgtggccgggtagggtatcgataataaaatcttcgtcagggctattatcataggtgcaggcagcgccgtacaggcagcaaccgatacccggcaatacattgcgcaagaacgggaaggcttcactcccatcactggccacttccgcaaacggaacacgttcatccgcactatggataacctggcctccgttatgtttgccaatcttcaacgcgtcgttttctgccggaaaaccataatattgatcgccattgggcagttcaccggtaaacgccgggaatttattcttcacgctatagcggccatcggcctgataccaggcaaatactttgcgtacgggctggacaggcagctccgggagcaggtcttttacccatgttcccgcgcagacaatcgcttttttcgcctgatactcaccgtcagccgtttcaatagttacgccatcatcgtcatgacgaattgcggtgaccgggcagttgaacagttgcgcacagcccgcttccttcgccagttggatccaggttttaatcgccagttcgctgcgcaaaaaaccggaatcagtttcaaataagccgatgtagttgtccgggacgcgtatttccggccagcgggccataatcccttgcgcatcgagcttttcaacgttgagttgccattgttcggcgctgtgggcgacgttggcgagaaatgtggaatcagccgggccaaggttaatgacgccagagcgtacaaaaatgggatcttcttcgttgtggcgggagagttcatcccacagcgtttgcgcgcggaggaccagcgggacatacttttcgccttcaccataagcatggcgaattaatcgcgtatcgccgtggtggctgccgtgttgatgcggtggcatatgggcgtcggtcattagcacgtttaaaccggcgcgggttgcataatacccggcggcagcgcctacggaaccgctgccaataatgatgagatcgtatttcatttttttctctctgctctcatggtttaagcagagtaattaactgaatgcagatatacaacccagaaatggtaaaggcaccggtgaggtgccttttgggtggatggtcatgtcatgttaatgacgccgatactcgtttacctggaaatcaccggattcaattttggcgattcctgcttctaatatgctaataaattgtctggcaacatcagtggttaaccagagcgtctgaccaacttcagtcccttcctgctcggacttatttggggtctggtagtgcaaacgcaacatcagcgcatcatagctatcaacggtgctgatgtcccaccctacgagcggatgagtctgaatgacttcattatttttttccatcatggccccctaattcgtgttactagacaacgttattcgaggttcaatgcgtttttatctgaagcaacttcagtataccaataagtaagggtattcaccgaatttttaaagggggaaacagataaatttctgcttttaagatttatatgaacaataaaacagcatgtcattcatatttttttagcatattgtgcaattattttgaggaagtgtagaaattttgtactcaaaattcgtaagtaaaataaaaaagccggggcgacccggcaaaaaaaatcactgcatattattcgctgacaaaccagtcatcggcgctttcccacgtttcctggagaatttcactaatgcgctgtttatcttcttttgtcgcgccaataacgcttaaattattcgctgcggcataacgtacgcttacgtggccttcattatcaggaaacgcatactgaatacggcgggaaagttcgccagccagggcgtcaatagccccagctggcaatggagaagttttcgctatggtgacttcaattcgcataatagccccctgttgaatatactggttatttatacaggtaaaataacctaatgacaacaggaagctacgatttttattgtttaacggaccagcgtaccgtttccccggcgaggaatggcaccagcgtgtcatcagtcagtgcgatgctttcagcaacctgttgctcttcacgtaccagttcgatgaatgtgtcgttgaccggcaacccatagaactgcgggccgtttacagaacagaatgcttcaaagtgctgcaaagcattcatttcttcaaagacggtagcgtaactgcccagcgcggttggggcgttgaagcagcccgcgcagccgcaactgctctctttgcgatgacgtgcatgtggcgcagaatccgtaccgaggaatactcgattaaaaccgctggcgaccagttcacgcaatgcctgttggtgaatattacgtttgaggatgggtagacaatacaggtgcggacgcacgcctccaaccagcatatggttgcggttaaacatcagatgctgcggagtgatggtggcagccagccgttcatttccgtcacggacatagtcggcagcatctttggtggtgatgtgctcaaaaacgactttcagcgcagtcaggcgctggcgcagaggttccatcacgctttctataaagcgcgcttcacgatcaaaaatgtcgatatctgcatgtgtcacttcaccatgcaccagtagcggcataccgattttttccatgcgctcaagtaccggcatgattgcgtcaatactcgtcacgccgtggctggagttagtggttgcgtttgccgggtaaagttttgcagcggtgaacacgccttcgttaaatccgcgctccagctcattaggatccaggctatctgttaaataacaggtcatcaatggggtgaaatcgtgcccggcaggtacggcgtcaagaatacgctggcgatacgccacggcagcctcaacggtggtcacgggcggagccagattgggcattacgatagcccgtccataaatttcgctggtatatggcacgacagtttttaacatgtcgccatcgcggaggtgaaggtgccagtcgtctgggcggcggatctttaatacctgggatggtgcagtcattaatctctatgctccggctgaagggatgtttttgccggacacaaaggataagcggaaacgttttcctttgcacgaaaaataaagggcgcgaatgcgccctcgtgattaatcagtaaatggaatgacaatttcgcctggcttcacttcaatgcctttcgccagttttttcgccattgcttcgccctggctgccatcttcgcgcaggacgtaagcaggttgctggttaaagtaattgcgtaatgcctggttcaaatagggaagcaacgtttgcatcaccgtttgcattttttccggttgtaccgtcgcatcgaccacttccatctctttcaggaagatcgcacctttttctttatcaaacacgggcagcgctttcagcttcagtttcatggtcgctttctgactaccgaacagggagttcatgtccagattggcgtctccggttagggtaaccttattcggctcttcgcgaccaatttggctggtcaggtttgtcagaacaatatgggcgtcagccacgccgggtaaaccgatatctttactgaaattattatgtttcgcaaggctctggttaatttcttgttcggtgatggtgtattgggtgagttgattacagccaacgagcaggccactgacgatcaatgcagcggcaaataaaaacttgttcatggtagtcctcgacatgaaatctgcgtcaatatcctgacacaacgcagcatgtgtcaccagcgataaactcgccagcagaaaaaactgaaaacggcggcaacccgcgaatacaggctgccgcggcgggtcaggattaaatcgccatactacttaacaaattgatttgtgtctgtttcgccatattatcgcggtaatcagcaacgcggcttggccagttaattccggctaccagcgtcagattacgcagtagcgggaatagctgaatatcatcttcgctaagttcgccattcacggcgttcggtttgacgatcagtttgtccagcgcacgtaaatcatcgctgatattcttaatcagaccgtcagagtgggccagcaggtcggcaaaattacccgcgctggcctctttcttgtcgacgaaatatttgcgcgcggcgggagtagaaaactcatcaaatgcgcttttggcaaaacgcggcaacagcagtttgttggcgtagccattgaccttgcgcagccactcttcaatggcaggggaacgtttgccggtcagtaacggtttgccgtcgagtttatcgacatagtgaacgatgtccatgctttctggcatatagcggctgtcatctttttgcagaatgggaacctgtttttgaccgaccatccgggtgggtgtttctgcgtcgtcgttgagcagaacatgtaattcgacggggatatttttcaggccgaaaatcatgcgggctttgaggcagtaagggcagtgatcgtaaatgtatagcttcacgtgactcctccatttggctgtcagttcactttcagtatgaaggagtcaggggggagtatcaaatcaggcgtcgcgttcaagcaaacgacgcgcggcgcgtttctggctaaactgccaacccagcgcaaggaaagtgaagatgccaataatgcccagcatcatccacggaagctctggctggtgcgcgcttttgcccaggtcaaacagccagccgccaccgatataaccaatagcgccgccaatcgccagacccagacggctaaaccccatatagctgccgcgagctcttgcgtccgccaggctagcacttaaggtttcacgcgcaggctcggcaatgatgctcccgatataaaacagacaaatcagggtgaaaagttgttgcaggccgctgaccatgcccaccggcatcatgcttaaactcattatcaacagcccagccatcaaccggtgttccagacgaaaatgcttttcactccagcgggcgatagggtagagcaacgttaagctcagacacgcttcaatggcatacatccatttaacggcagagggcgcgcagccacgtcgttgaccataattggcagcatcagcatcacttgtacagccagcatgtagtaacccgccagcgtcagaacataggtgacaaaacgcttgtcacgcatcacgcgggtcatgccttcgcgaacgggcgtgcgtacggtggagagtttccatgctggtaacaaccacgcattgaacgccgcacatagcacaaatagaactgcccctgtggcgcagaccaggcgaaagtcgtattgcaacagccagctccccaacaatgcgccaatgaccgcaccggcactgtcctgcatcatcaacaggctgaaaaaacgaccacgctgctgtggacggattaatttcaccaccagcgcgctacgcggcggatcaaacaacgtgccaccgagtccgctgagcaggcaactaaaccacaatagccacggttcgtgggcgatacccattgtggcgaatccggcggcgcgcatcagcataccggtaacaatcatcggtttggcaccaaagcggtcggcaattgcaccgccgaaaatacccagaccttgctgaataaattggcgtagaccgagagcaataccgaccatgacggcggcccagcccatttgatcaacgaagcggatagagatcagcgggaagacaacaaagaaccccagcacgaccagcatattatcgatgagcaggaaatatttacccaggttcctcgcctggctcacgcgggacatttcccctcccgggaaataaaagatgagcactttctattctgcattgccgctaagacttttcccatcacttcggggacaatatttttttatcaaaacgtcgctttgatagagagtttttatcaaatatgtgaataatgcagaaaatggcattttggacttttcacagggtctggttgcgcaggtatagtaatacttacagcgtattaaagacgttacgggaaggagtaggtatagaatgtttggctatcgcagtaacgtgccaaaagtgcgcttaaccacagaccgactggtcgtgcgtctggtgcatgatcgtgatgcctggcgtcttgcggattattacgcagagaatcgccatttcctcaagccctgggagccagtgcgcgacgaaagccactgttatccaagtggctggcaggccaggctggggatgattaacgaatttcataaacaaggtagtgctttctactttggcttattcgacccggacgaaaaagagattattggcgttgccaatttttccaatgttgttcgtggctcttttcatgcctgctatctcggttatagcattgggcaaaaatggcagggcaaaggactcatgtttgaagccctgaccgcagccattcgttatatgcagcgcacccaacatattcatcgcattatggctaattatatgccgcacaataaacgcagcggtgatttactggcgcgactgggttttgaaaaagaaggctatgcgaaagactatctgttgattgatggacaatggcgcgatcacgtactgacggcattaactaccccagactggacgcccggccgctaaggagaatctcatgaaatatcaacttactgcccttgaagctcgcgtgattggttgcttgctggaaaagcaggtgaccacgccggagcaatacccgctcagtgtcaatggtgtagtcacggcctgtaatcagaaaacgaaccgtgaaccggtcatgaatctgagtgaatccgaagtgcaggaacagctggataatctggtcaaacgtcattatctacgcacagtgagcggttttggtaatcgggtcaccaaatatgagcaacgtttttgtaatagtgaatttggcgatctgaaactgagcgcagcggaagtggcgttaatcaccacgttgttattgcgtggtgcccagacgccaggtgaactgcgcagccgcgccgcgcgaatgtatgaattcagcgatatggcggaagtggagagcacgctggaacaactggcaaatcgcgaagatggtccttttgtggtgcgtctggcccgcgaaccgggtaaacgcgaaaaccgctacatgcatcttttcagtggtgaggttgaagatcagccggcggtgacggatatgagcaacgcggttgacggtgatttacaggcccgcgtcgaagccctggaaatcgaagtggcagaactgaaacagcgtcttgatagcttgctggcccatctgggagattaaagtgaaaaaattacgtatcggcgtagtgggattaggtggcattgcgcaaaaagcgtggttaccggtgctggcggcagcgtctgactggacgttacaaggagcctggagccctacgcgcgcgaaagccctgccaatttgtgaaagctggcgcattccttatgccgatagcttatccagccttgccgccagttgcgatgcggtttttgtgcattccagcaccgccagccactttgacgtggtcagtacgttactcaatgcgggggtacatgtctgtgtcgataaaccgctggcagaaaatctgcgcgatgctgaacggctggtggaactggcggcgcggaaaaaactgacgttgatggtcggttttaaccgtcgtttcgcaccactctacggtgagttaaaaacgcaactcgccaccgcagccagcctaagaatggataaacatcgtagcaatagcgtcgggccacacgatctttatttcacgttgctggatgattatctgcatgtggtggataccgcgctgtggttgagcggcggcaaagcctctctggatggcggtacgctactgactaacgacgctggcgaaatgctgtttgccgagcaccattttagcgctggtcctttgcagatcaccacctgtatgcatcgccgtgccggaagtcagcgtgaaaccgtgcaggccgtgactgacggtgcgctcatcgacattacggatatgcgcgaatggcgtgaggagcgcgggcagggcgtagtgcataaaccgattcctggttggcagagtacgcttgagcaacgtgggtttgtcggctgtgcgcggcacttcattgaatgtgtgcaaaaccagacagttccgcaaaccgccggcgaacaggccgtgctggcgcaacgtatcgttgacaagatctggcgcgatgcgatgagtgaataaaccctgtaacatctggcggtagcaattcaccataatccaggtagactattcgcctctttcagcgcctgccttgcaggcgttttgcccgtgggtctggattagaacaccgatgaatttattaaaaagcctggccgccgtcagcagcatgaccatgtttagccgtgtgcttggcttcgcacgagacgcaattgtcgccagaatctttggcgcagggatggcaaccgacgcctttttcgtcgcttttaaacttcctaacttgttacgccgtatctttgccgaaggggcattttcccaggcatttgtaccgattctggcggaatataaaagtaagcagggtgaagacgccacgcgggtctttgtctcttatgtttctggcctgctgacacttgcgctggcggttgtgacggtcgctggcatgctcgccgcaccgtgggtgatcatggtgaccgcgccaggcttcgctgacacagctgacaaatttgccctgaccagccagctactaaagattacctttccctatatcttgctgatctccctggcgagcctggtgggagcgattctgaatacgtggaaccgcttcagcattccggcgtttgctccaacactgcttaacatcagcatgattggtttcgcgctgtttgccgcaccgtactttaacccaccggtgctggcgctggcgtgggctgttacggtcggcggcgtcctgcagctggtgtatcagctaccgcacctgaagaagatcggcatgctggtcctgccgcgcattaacttccacgatgccggagcaatgcgcgtggtgaaacagatgggaccggcgatccttggcgtctctgtgagccagatctccttaatcatcaacaccatttttgccagctttcttgcttccggtagcgtgtcttggatgtattacgccgaccgcttaatggagtttccgtccggtgtgctgggcgtggcgcttggcaccattttgctgccgagcctgagcaaaagttttgccagtggcaatcatgatgaatacaaccgtttgatggactgggggttgcgtctttgtttcctgttggcgctgccgagtgcggttgcgttgggcattctttccggtccgttgaccgttagcctgttccagtacggtaaatttaccgcgtttgatgcgctgatgacccagcgggcgttaattgcctacagcgtgggtttgattggcctgattgtagtgaaagtgttggctcctggcttttattcccgccaggacattaaaacgccagtgaaaattgccatcgttacgctgattttaacgcaattgatgaacctggcgtttattggtccgttgaaacatgccgggctgagtctttctattggtctggcggcgtgtctgaatgctagcctgctttactggcagttgcgtaagcagaaaatctttaccccgcaacccggctggatggcgtttctgttgcgtctggtggtggcggtactggtgatgtctggcgtgcttttaggtatgttacatatcatgccggagtggagtttgggtaccatgccctggcgtttactgcgtttaatggcggtcgtgctggcggggattgccgcgtacttcgctgcactggcggtactgggcttcaaagttaaagaatttgcccgccggacggtgtaacaatgcattccggcctgcagtgttcgctttaaaacatatcatgaaactgggtatgttttgtctgcctgctctgggatcgctggggcgggcatttttttgcctattttgcattgttggttagcaaggatgccattcgatgaattttaatatgttgattcaaagatgaaataaaaaagccctgcagttaccagggcttgattactttgagctaattattactcaacaggttgcggacgcgcaggagcggcagaggcatgatgtgttgccgtatgaccacctgcggcacctttaccttcgaaggcaaaagtagggcgctgccagtcactgtgacgcggtgcctccggaacatattccggtgctggagcgcgcgtcattggcgcggtagcgtggttatgctcaacggtgacctcaggttcgaccgcagctaccgtttcaacttctgctgcgacttcagcgactactggcgcggcaggttgagcaacaacttcaggttcagcaactacaacctcagcagtttcgacaacttcttcaatatctgccgtctcttcctgcggttcaaccaccggttctgcttgttctgcaacttcctgggctacggcaacatcagactcggtaatcacctgcggctgttcagttaccgcggcagcgatcacttcaggatgcgtcgtttcaaccacttccggttgcggttcggcaacctgaacgggggcttctacgacaccggccacttcttcaacaactggcgcgctaacaaccggttcgatagcggcggcgacagggacctcagtcaccatcggctgcacatgtacttcttcctgttcgcgctgctcttcaacctgtacatcttgcggacgtacaattggatagcggatccagactttgccagaggccagttccggagacgcgcacgctacggtcaacggcattgggctctgggttggataacgctcgtcacgatagcgacgacgacgctgaccacttacgcgcaggtgacgagggctgcggcgagaacgacgcggcatgccaccgttgtcacggttatcagcattgttctcttcttgctgttctggtgcagtttgcgctacgactggcagcgggactttcaccagttctgtgcgtggagctggcgcttcctgaacaattggttcggcagcgacagtttcttcaaccaccggtgcgactaccgcttcttcggctacgctttgctcgtaacgcactttctgattgagctgacgctgtttacgacgcggctgaaccggacgtacacgttcttcctgttcggtttcctgaacagattgctcttcaacattcagcgccttcgcttcttgttgcgcctgacgtttatcatcattacggcggcggctacgttcacgacgcggcgcttgctgctcgtcggcggtacgcgctttttccgttacctcagcctgctgacggctctcacgcgtctcggcagtctgctgctgtgcctggcgacgattacgacggttttcttcgcgattatcgctgccttcagtacgttcactacgggtgtcgcggcgctcattacggtcacggcggttgttctgacgaggcttgcgacgatcctgttgacgttccggtttcgcttctgctttcggtgctggttgctcggtcggtttggtttcttcaccaccgctgaacagcgctttcagtgcgccgaagaagcggctcaacagcccaggttgtgcaggagctgctggtgttgccggtgcagctttcggtgctggagctacaacaggcgcggcaggttcagctggcgttggcgcaggcggcacatccggcatggcaaaggttgccagcgcaggttgttccggacgcttacgttcagcgaactcttcttcagacggcagcgccatcgcttcttcatgcagcttcggcagcatgtagcttaaggttggggtttcttcccctttacgcacgcgcagcacgtggtagtgcggggtttccatctgatcgtttggcacaattacacagcgcacaccgtcctgacgagtttcaatggcatttaccgcagaacgtttttcattcagcaggtaagaagcgattggcacaggaacaatggcgtgaacttcctgggtgttctctttcagcgcttcttcttcgatcagacgcagaatagagaggctcaggctttcgttgtcacgcacggtgccagtaccagaacaacgcggacaaacgtgatgactggattcacccagacttgggctcaggcgctgacgggacatttccagcaggccaaagcgagaaatatggctgatttgaatacgcgcacggtcctgacgcaccgcttcacgcagacggttttctaccgcacgctggtggcgtactggcgtcatgtcgatgaagtcgataacaatcaggccgccgaggtcacgcaggcgcagctgacgagcaatctcatcggcagcttcgaggttagtgttaaacgcggtttcttcgatatcgccgccgcgggtcgcgcgtgcggagttgatgtcgatggccgttaacgcttcggtgctgtcgataacaatggaaccaccagacggcagacgaacttcacgctggaaggcggactcgatctgactctcgatctggtagtggctgaacagcgggatctcgccggtgtacagtttgattttgctgctgaaatccgggcgacctaatgcagcgatatgctgacgtgccagttcgagcactttcgggttatcgataaggatttcgccgatgtcctgacgtaagtaatcgcggaatgcgcgaacgattacgttgctctcctgatgaatcaggaacggggccgggcggctttcagcggcttttttgatggcttcccagtgtttcagacggaagcttaaatcccattgcagcgcctcagcagatttgccgacgccagcggtgcgcacgataagccccatgccttccggcagttcaaggcttgccagtgcttcttttaattcggtacggtcgtcgccttcgatacggcgagaaatgccacccgcgcgcgggttgttcggcatcagaaccagatagctacccgccagactgataaaggtggttaatgccgcgcctttgttgccgcgctcttctttatcgatctgaacaatgacttcctgaccttcacgcaacacatctttaatgttgggacgaccatgagcactgtagttagcagggaaatattcgcgggcaatttcttttagtgggaggaaaccgtgacgttcagcgccgtaatcaacaaaagcagcttccagactcggttcaatgcgggtgattttacctttgtagatgtttgcctttttctgctcgtgccctggactttcgatatccaggtcatacagacgctgcccatctacaagggcaacgcgcaactcttcctgctgagttgcgttgattaacattcttttcatcgtaacttactcattattcttacattgacgactaagctgcgggcaaagtaacgcctttccgggtgtgaaccgatggcctcgtgtctagtcgcgtcgccaacctcacggttatcgtcagctcaaagaggcgcagagtgtgagttgcccgtttttcatgcggaaaaacagcgcaattatcaaagaaacagactgggtattactctccagaaatatttccatctaccggtaaggactgcaacccgcagcccgctaactgcctgaaagatcaatacgtcttacgccattgctgcgtggatgatcggtcgggcaaaatgggttattccgtaaaatttcttgttttaacaaggatggacacggaaacggcctcattattccactgcaagccttgttatagcaagatgacttttaccatttatcacccgcttactcacagttttttcacttcttgctggtgattggtttaataaccatcaataaagtgatcacgcagtgaagtaataaggtgcaaaagtaaatataagcatagaaaaatgagtggcgcgaatcctgttggctaattagaatcgccaaccatgaaaacagagactccatccgtaaaaattgttgctatcaccgctgacgaagcggggcaacgtatcgataactttttgcgtacccaattgaaaggcgtaccaaaaagtatgatttaccgtattttgcgtaaaggcgaagtgcgggtgaacaaaaaacgtattaagcctgaatataaactcgaagcgggtgatgaggtgcgtattccaccggttcgcgttgctgagcgggaagaagaggcggttagcccacatctgcaaaaggtggcggcgctggcggacgtcatcttatatgaagatgatcacatcctggtgctgaataaaccttccggtacggcggtacatggcggcagtggtttaagcttcggcgttattgaaggtttgcgggcgttgcgcccggaagcgcggttccttgaactggttcatcgtcttgaccgggacaccagtggtgttttgctggtagcgaaaaaacgcagcgcgttgcgttctctgcatgagcaattacgtgaaaaagggatgcaaaaagattacctggcgctggtgcgcggtcagtggcagagccatgtgaagagcgttcaagcaccgttactgaaaaatattctgcaaagcggcgaacgtatcgtgcgtgtgagtcaggaaggcaaaccgagcgaaacacgctttaaagtggaagaacgctatgcatttgccaccctggtgcgttgtagcccggtaacagggcgtactcaccagatccgtgtgcatacacaatatgcgggtcatccgattgcctttgacgatcgctacggtgaccgtgaatttgacaggcagctcactgaagcaggcacgggattaaatcgcctgttcctgcacgctgcagcgttgaagtttactcatccggggaccggtgaggtgatgcgtatcgaagctccgatggatgaaggtttgaagcgttgtttgcaaaagctgcgtaacgcgcgctaatacaagcatataaacctgataatgggcggttggcctgataaggcgtttacgccgcatcaggccgccagcaccgattgccggatgcgacgtaaccacatccggcgcaaaaaattatcccatcagcgggtttttcccttcccgacgtaacatctgacacagcgcgattagcggtaaaccaaccagcgtgttaggatcacgcccctctaaacgctcaaacagcgtaatgccaaatccttcactcttaaagctacccgcgcagtgcaggggatgctctttacgcacgtaattatcaatctccgcctcgctcaggtgacggaaatggacgtcaaaaggctccacttctgtttgcagatgcccattcgcgctattaaacaacgccagtccagtatagaaggtgacgatattgccgctggctttgcgtaattgcagacgggcattttcttccgttaacggtttaccggtgatttcgccatcaagaacacatacctggtcactaccaataattaaatgatccggataacgactcgccagagattgcgctttttcttgtgccagtcgaagcaccaactgtcgcggactttcgtcgctgcgtggggtttcgtcgacctctggtgctgcacattcaaaagagatttgcagtttttccagaagagcgcgacgccatgggctggtggaggctaaaataagtttaggcatatttttttccatcagatatagcgtattgatgatagccattttaaactatgcgcttcgttttgcaggttgatgtttgttatcagcactgaacgaaaataaagcagtaacccgcaatgtgtgcgaattattggcaaaaggcaaccacaggctgcctttttctttgactctatgacgttacaaagttaatatgcgcgccctatgcaaaaggtaaaattacccctgactctcgatccggttcgtacggctcaaaaacgccttgattaccagggtatctatacccctgatcaggttgagcgcgtcgccgaatccgtagtcagtgtggacagtgatgtggaatgctccatgagcttcgctatcgataaccaacgtctcgcagtgttaaacggcgatgcgaaggtgacggtaacgctcgagtgtcagcgttgcgggaagccgtttactcatcaggtctacacaacgtattgttttagtcctgtgcgtagtgacgaacaggctgaagcactgccggaagcgtatgaaccgattgaggttaacgaattcggtgaaatcgatctgcttgcaatggttgaagatgaaatcatcctcgccttgccggtagttccggtgcatgattctgaacactgtgaagtgtccgaagcggacatggtctttggtgaactgcctgaagaagcgcaaaagccaaacccatttgccgtattagccagcttaaagcgtaagtaattggtgctccccgttggatcggggataaaccgtaattgaggagtaaggtccatggccgtacaacagaataaaccaacccgttccaaacgtggcatgcgtcgttcccatgacgcgctgaccgcagtcaccagcctgtctgtagacaaaacttctggtgaaaaacacctgcgtcaccacatcactgccgacggttactaccgcggccgcaaggtcatcgctaagtaatcacgcatctgcgtgatgaagcttagtgaggattttccccaggcaactggggaaagaccaaaccgggcggcgacgataccttgacacgtctaaccctggcgttagatgtcatgggaggggattttggcccttccgtgacagtgcctgcagcattgcaggcactgaattctaatagccaactcactcttcttttagtcggcaattccgacgccatcacgccattacttgctaaagctgactttgaacaacgtagccgtctgcagattattcctgcgcagagtgttatcgccagtgatgcccggcctagccaagctatccgcgccagtcgtgggagtagtatgcgcgtggccctggagctggtgaaagaaggtcgagcgcaagcctgtgtcagtgccggtaataccggggcgctgatggggctggcaaaattattactcaagcccctggaggggattgagcgtccggcgctggtgacggtattaccacatcagcaaaagggcaaaacggtggtccttgacttaggggccaacgtcgattgtgacagcacaatgctggtgcaatttgccattatgggcagtgttctggctgaagaggtggtggaaattcccaatcctcgcgtggcgttgctcaatattggtgaagaagaagtaaagggtctcgacagtattcgggatgccagtgcggtgcttaaaacaatcccttctatcaattatatcggctatcttgaagccaatgagttgttaactggcaagacagatgtgctggtttgtgacggctttacaggaaatgtcacattaaagacgatggaaggtgttgtcaggatgttcctttctctgctgaaatctcagggtgaagggaaaaaacggagctggtggctactgttattaaagcgttggctacaaaagagcctgacgaggcgattcagtcacctcaaccccgaccagtataacggcgcctgtctgttaggattgcgcggcacggtgataaaaagtcatggtgcagccaatcagcgagcttttgcggtcgcgattgaacaggcagtgcaggcggtgcagcgacaagttcctcagcgaattgccgctcgcctggaatctgtatacccagctggttttgagctgctggacggtggcaaaagcggaactctgcggtaacaggacgctgccagcgaactcgcagtttgcaagtgacggtatataaccgaaaagtgactgagcgtacatgtatacgaagattattggtactggcagctatctgcccgaacaagtgcggacaaacgccgatttggaaaaaatggtggacacctctgacgagtggattgtcactcgtaccggtatccgcgaacgccacattgccgcgccaaacgaaaccgttagtaccatgggctttgaagcggcgacacgcgcaattgagatggcgggcattgagaaagaccagattggcctgatcgttgtggcaacgacttctgctacgcacgctttcccgagcgcagcttgtcagattcaaagcatgttgggcattaaaggttgcccggcatttgacgttgcagcagcctgcgcaggtttcacctatgcattaagcgtagccgatcaatacgtgaaatctggggcggtgaagtatgctctggtcgtcggttccgatgtactggcgcgcacctgcgatccaaccgatcgtgggactattattatttttggcgatggcgcgggcgctgcggtgctggctgcctctgaagagccgggaatcatttccacccatctgcatgccgacggtagttatggtgaattgctgacgctgccaaacgccgaccgcgtgaatccagagaatagtattcatctgacgatggcgggcaacgaagtcttcaaggttgcggtaacggaactggcgcacatcgttgatgagacgctggcggcgaataatcttgaccgttctcaactggactggctggttccgcatcaggctaacctgcgtattatcagtgcaacggcgaaaaaactcggtatgtctatggataatgtcgtggtgacgctggatcgccacggtaatacctctgcggcctctgtcccgtgcgcgctggatgaagctgtacgcgacgggcgcattaagccggggcagttggttctgcttgaagcctttggcggtggattcacctggggctccgcgctggttcgtttctaagataaggattaaaacatgacgcaatttgcatttgtgttccctggacagggttctcaaaccgttggaatgctggctgatatggcggcgagctatccaattgtcgaagaaacgtttgctgaagcttctgcggcgctgggctacgacctgtgggcgctgacccagcaggggccagctgaagaactgaataaaacctggcaaactcagcctgcgctgttgactgcatctgttgcgctgtatcgcgtatggcagcagcagggcggtaaagcaccggcaatgatggccggtcacagcctgggggaatactccgcgctggtttgcgctggtgtgattgatttcgctgatgcggtgcgtctggttgagatgcgcggcaagttcatgcaagaagccgtaccggaaggcacgggcgctatggcggcaatcatcggtctggatgatgcgtctattgcgaaagcgtgtgaagaagctgcagaaggtcaggtcgtttctccggtaaactttaactctccgggacaggtggttattgccggtcataaagaagcggttgagcgtgctggcgctgcctgtaaagcggcgggcgcaaaacgcgcgctgccgttaccagtgagcgtaccgtctcactgtgcgctgatgaaaccagcagccgacaaactggcagtagaattagcgaaaatcacctttaacgcaccaacagttcctgttgtgaataacgttgatgtgaaatgcgaaaccaatggtgatgccatccgtgacgcactggtacgtcagttgtataacccggttcagtggacgaagtctgttgagtacatggcagcgcaaggcgtagaacatctctatgaagtcggcccgggcaaagtgcttactggcctgacgaaacgcattgtcgacaccctgaccgccagcgcgctgaacgaacctagtgcgatggcagcggcgctcgagctttaaaagaggaaaatcatgaattttgaaggaaaaatcgcactggtaaccggtgcaagccgcggaattggccgcgcaattgctgaaacgctcgcagcccgtggcgcgaaagttattggcactgcgaccagtgaaaatggcgctcaggcgatcagtgattatttaggtgccaacggcaaaggtctgatgttgaatgtgaccgacccggcatctatcgaatctgttctggaaaaaattcgcgcagaatttggtgaagtggatatcctggtcaataatgccggtatcactcgtgataacctgttaatgcgaatgaaagatgaagagtggaacgatattatcgaaaccaaccttagttctgttttccgtctgagtaaagcggtaatgcgcgctatgatgaaaaagcgtcatggtcgtattatcactatcggttctgtggttggtaccatgggaaatggcggtcaggccaactacgctgcggcgaaagcgggcttgatcggcttcagtaaaagtctggcgcgcgaagttgcgagtcgcggtattactgtaaacgttgttgctccgggctttattgaaacggacatgacacgtgcgctgagcgatgaccagcgtgcgggtatcctggcgcaggttcctgcgggtcgcctcggcggcgcacaggaaatcgccaacgcggttgcattcctggcatccgacgaagcagcttacatcacgggtgaaactttgcatgtgaacggcgggatgtacatggtctgaccgcgatttgcacaaaatgctcatgttgcgcgcagtctgcgtggttatgagtaataattagtgcaaaatgatttgcgttattggggggtaaggcctcaaaataacgtaaaatcgtggtaagacctgccgggatttagttgcaaatttttcaacattttatacactacgaaaaccatcgcgaaagcgagttttgataggaaatttaagagtatgagcactatcgaagaacgcgttaagaaaattatcggcgaacagctgggcgttaagcaggaagaagttaccaacaatgcttctttcgttgaagacctgggcgcggattctcttgacaccgttgagctggtaatggctctggaagaagagtttgatactgagattccggacgaagaagctgagaaaatcaccaccgttcaggctgccattgattacatcaacggccaccaggcgtaagtgaacatctccaggcggtcgttcgaccgcctgagttttatctttttgtcccactagaatcattttttccctccctggaggacaaacgtgtctaagcgtcgtgtagttgtgaccggactgggcatgttgtctcctgtcggcaataccgtagagtctacctggaaagctctgcttgccggtcagagtggcatcagcctaatcgaccatttcgatactagcgcctatgcaacgaaatttgctggcttagtaaaggattttaactgtgaggacattatcagccgcaaagaacagcgcaagatggatgccttcattcaatatggaattgtcgctggcgttcaggccatgcaggattctggccttgaaataacggaagagaacgcaacccgcattggtgccgcaattggctccgggattggcggcctcggactgatcgaagaaaaccacacatctctgatgaacggtggtccacgtaagatcagtccattcttcgttccgagtacgattgtgaacatggtggcaggtcatctgactatcatgtatggcctgcgtggcccgagcatctctatcgcgactgcctgtacttccggcgtgcacaacattggccatgctgcgcgtattatcgcgtatggcgatgctgacgtgatggttgcaggtggcgcagagaaagccagtacgccgctgggcgttggtggttttggcgcggcacgtgcattatctacccgcaatgataacccgcaagcggcgagccgcccgtgggataaagagcgtgatggtttcgtactgggcgatggtgccggtatgctggtacttgaagagtacgaacacgcgaaaaaacgcggtgcgaaaatttacgctgaactcgtcggctttggtatgagcagcgatgcttatcatatgacgagtccgccagaaaatggcgcaggcgcagctctggcgatggcaaatgctctgcgtgatgcaggcattgaagcgagtcagattggctacgttaacgcgcacggtacttctacgccggctggcgataaagctgaagcgcaggcggtgaaaaccatcttcggtgaagctgcaagccgtgtgttggtaagctccacgaaatctatgaccggtcacctgttaggtgcggcgggtgcagtagaatctatctactccatcctggcgctgcgcgatcaggctgttccgccaaccatcaacctggataacccggatgaaggttgcgatctggatttcgtaccgcacgaagcgcgtcaggttagcggaatggaatacactctgtgtaactccttcggcttcggtggcactaatggttctttgatctttaaaaagatctaagttgtcattttccacccttataaaaggtccgcttgcgggccttttttcttagcttttattccgacttgttccgtagtgaacatgctgccacactaacaattctctgataaggagccggtatgttcttaattaacggtcataagcaggaaagcctggcagtaagcgatcgggcaacgcagtttggtgatggttgttttaccaccgccagagttatcgacggtaaagtcagtttgttaagcgcgcatatccagcgactacaggatgcttgtcagcggttgatgatttcctgtgacttctggcctcagcttgaacaagagatgaaaacgctggcagcagaacagcaaaatggtgtgctgaaagtcgtgatcagtcgcggtagtggcgggcgagggtacagcacattgaacagcggaccggcaacgcggattctctccgttacggcttatcctgcacattacgaccgtttgcgtaacgaggggattacgttggcgctaagcccggtgcggctggggcgcaatcctcatcttgcaggtattaaacatctcaatcgtcttgagcaagtattgattcgctctcatcttgagcagacaaacgctgatgaggcgctggtccttgacagcgaagggtgggttacggaatgctgtgcggctaatttgttctggcggaagggcaacgtagtttatacgccgcgactggatcaggcaggtgttaacggcattatgcgacaattctgtatccgtttgctggcacaatcctcttatcagcttgtcgaagtgcaagcctctctggaagagagcttgcaggcagatgagatggttatttgtaatgcgttaatgccagtgatgcccgtatgtgcctgtggcgatgtctcctttagcagtgcaacgttatatgaatatttagccccactttgtgagcgcccgaattaatcatgaaaaaagtgttattgataatcttgttattgctggtggtactgggtatcgccgctggtgtgggcgtctggaaggttcgccatcttgccgacagcaaattgcttatcaaagaagagacgatatttaccctgaagccagggaccggacgtctggcgctcggtgaacagctttatgccgataagatcatcaatcgtccacgggtttttcaatggctgctgcgtatcgaaccggatctttctcactttaaagccgggacttaccgctttacaccgcagatgaccgtgcgcgagatgctgaaattgctggaaagcggtaaagaagcacagttccctctgcgactggtagaagggatgcgtctgagcgattacctcaagcaattgcgtgaggccccgtatatcaagcatacgctgagcgatgataagtacgccaccgtagcgcaggcacttgaactggaaaacccggagtggattgaaggttggttctggccagacacctggatgtataccgccaataccaccgatgtcgcgttactcaagcgagcgcacaagaaaatggtgaaagcggtcgatagcgcctgggaagggcgtgcggacggtctgccttataaagataaaaaccagttggtgacgatggcaagtattatcgaaaaagaaaccgccgttgccagtgaacgcgataaggttgccagtgtatttatcaaccgtttacgcattggtatgcgcctgcagaccgacccgaccgtgatttacgggatgggagagcgttataatggcaaactttctcgtgcagacctggaaacgccgacagcgtataacacctataccattaccggtctgccgccaggtgcgatagcgacgccgggggcggatagcctgaaggctgctgcgcatccggcaaaaacgccgtatctctattttgtggccgatggtaaaggtggtcacacgtttaataccaatcttgccagtcataacaagtctgtgcaggattatctgaaagtgcttaaggaaaaaaatgcgcagtaagtatatcgtcattgaggggctggaaggcgcaggcaaaactaccgcgcgtaatgtggtggttgagacgctcgagcaactgggtatccgcgacatggttttcactcgggaacctggcggtacgcaacttgccgaaaagttaagaagcctggtgctggatatcaaaagcgtaggcgatgaagtcattaccgataaagccgaagttctgatgttttatgccgcgcgcgttcaactggtagaaacggtcatcaaaccagctctggctaacggcacctgggtgattggcgatcgccacgatctctccactcaggcgtatcagggcggcggacgtggtattgaccaacatatgctggcaacactgcgtgatgctgttctcggggattttcgccccgacttaacgctctatctcgatgttaccccggaagttggcttaaaacgcgcgcgtgcgcgcggcgagctggatcgtattgagcaagaatctttcgatttctttaatcgcacccgcgcccgctatctggaactggcagcacaagataaaagcattcataccattgatgccacccagccgctggaggccgtgatggatgcaatccgcactaccgtgacccactgggtgaaggagttggacgcatgagatggtatccatggttacgacctgatttcgaaaaactggtagccagctatcaggccggaagaggtcaccatgcgctactcattcaggcgttaccgggcatgggcgatgatgctttaatctacgccctgagccgttatttactctgccaacaaccgcagggccacaaaagttgcggtcactgtcgtggatgtcagttgatgcaggctggcacgcatcccgattactacaccctggctcccgaaaaaggaaaaaatacgctgggcgttgatgcggtacgtgaggtcaccgaaaagctgaatgagcacgcacgcttaggtggtgcgaaagtcgtttgggtaaccgatgctgccttactaaccgacgccgcggctaacgcattgctgaaaacgcttgaagagccaccagcagaaacttggtttttcctggctacccgcgagcctgaacgtttactggcaacattacgtagtcgttgtcggttacattaccttgcgccgccgccggaacagtacgccgtgacctggcttagtcgcgaagtgacaatgagtcaggatgcattacttgccgcattgcgcttaagcgccggtagccctggcgcggcactggcgttgtttcagggagataactggcaggctcgtgaaacattgtgtcaggcgttggcatatagcgtgccaagcggcgactggtatagcctgctagcggcccttaatcatgaacaagctccggcgcgtttacactggctggcaacgttgctgatggatgcgctaaaacgccatcatggtgctgcgcaggtgaccaatgttgatgtgccgggcctggtcgccgaactggcaaaccatctttctcccagccgcctgcaggctatactgggggatgtttgccacattcgtgaacagttaatgtctgttacaggcatcaaccgcgagcttctcatcaccgatcttttactgcgtattgagcattacctgcaaccgggcgttgtgctaccggttcctcatctttaagagagacatcatgtttttagtcgacagtcactgccatctcgatggtctggattatgaatctttgcataaggacgtggatgacgttctggcgaaagccgccgcacgcgatgtgaaattttgtctggcagtcgccacaacattaccgggttatttacatatgcgggatctggtaggcgaacgtgacaacgtcgtattttcttgtggcgtgcatccactcaaccagaatgatccctacgatgtagaagatttacgccgtctggcggcagaagagggtgttgtagcgctgggtgaaaccgggctggattattattacacgccggaaactaaagtacgtcagcaagagtccttcatccatcatatccagattggtcgtgaactgaacaagccggttatcgtccatacccgtgacgcccgtgccgatacgctggcaattctgcgcgaagaaaaagtgacggattgcggtggcgtactacactgttttacagaggacagagaaacggcgggtaaattactggatctcggattttacatctccttttccggcattgtgaccttccgtaatgcggagcaactgcgcgatgctgcgcgttatgtccccctggatcggttactggtggaaactgacagtccttaccttgcgccggtaccgcatcgaggaaaagagaatcaacctgcgatggttcgtgacgttgcagaatacatggctgtgttgaaaggtgttgccgttgaagaactggcgcaggtaaccaccgataacttcgcccgtctgtttcacatcgacgcttcccgccttcaatccatccgttgaatgagtttttttaaagctcgtaattaatggctaaaacgagtaaagttcaccgccgaaaattgggcggtgaataaccacgtttgaaatattgtgacatatgttttgtcaaaatgtgcaacttctccaatgatctgaagttgaaacgtgatagccgtcaaacaaattggcactgaattattttactctgtgtaataaataaagggcgcttagatgccctgtacacggcgaggctctccccccttgccacgcgtgagaacgtaaaaaaagcacccatactcaggagcactctcaattatgtttaagaatgcatttgctaacctgcaaaaggtcggtaaaagcctgatgctgccggtatccgtactgcctatcgcaggtattctgctgggcgtcggttccgcgaatttcagctggctgcccgccgttgtaagccatgttatggcagaagcaggcggttccgtctttgcaaacatgccactgatttttgcgatcggtgtcgccctcggctttaccaataacgatggcgtatccgcgctggccgcagttgttgcctatggcatcatggttaaaaccatggccgtggttgcgccactggtactgcatttacctgctgaagaaatcgcctctaaacacctggcggatactggcgtactcggagggattatctccggtgcgatcgcagcgtacatgtttaaccgtttctaccgtattaagctgcctgagtatcttggcttctttgccggtaaacgctttgtgccgatcatttctggcctggctgccatctttactggcgttgtgctgtccttcatttggccgccgattggttctgcaatccagaccttctctcagtgggctgcttaccagaacccggtagttgcgtttggcatttacggtttcatcgaacgttgcctggtaccgtttggtctgcaccacatctggaacgtacctttccagatgcagattggtgaatacaccaacgcagcaggtcaggttttccacggcgacattccgcgttatatggcgggtgacccgactgcgggtaaactgtctggtggcttcctgttcaaaatgtacggtctgccagctgccgcaattgctatctggcactctgctaaaccagaaaaccgcgcgaaagtgggcggtattatgatctccgcggcgctgaccagcttcctgaccggtatcaccgagccgatcgagttctccttcatgttcgttgcgccgatcctgtacatcatccacgcgattctggcaggcctggcattcccaatctgtattcttctggggatgcgtgacggtacgagcttcagccacggtctgatcgacttcatcgttctgtctggtaacagcagcaaactgtggctgttcccgatcgtcggtatcggttatgcgattgtttactacaccatcttccgcgtgctgattaaagcactggatctgaaaacgccgggtcgtgaagacgcgactgaagatgcaaaagcgacaggtaccagcgaaatggcaccggctctggttgctgcatttggtggtaaagaaaacattactaacctcgacgcatgtattacccgtctgcgcgtcagcgttgctgatgtgtctaaagtggatcaggccggcctgaagaaactgggcgcagcgggcgtagtggttgctggttctggtgttcaggcgattttcggtactaaatccgataacctgaaaaccgagatggatgagtacatccgtaaccactaatccgtaagacgttggggagactaaggcagccagatggctgccttttttacaggtgttattcagaattgatacgtgccggtaatgctgaaattacgcggtgtgccgtagacgatagaaccttccacgttggtatcgtaggttttgtcgaacaggttattgacgttcccctgtaagctgaagtttttcgtcacctggtagcgggtgaagagatccaccagcgcgtagctaccttgctcggcgcggaaggtgccatacggcgtcacggtgtcggtatacacgcgattttgccagttaacaccaccgccgaccgtcaactctggcatgacaggcaaccgatagctggtgaacattttaaccgtggtgcgtggcagattaggattaacggcgtttccttcgttatcctctgcaatatagcgcgttgcgccaaatgtcagctgccagttgtcggtaattgcgccgttgagttcaaattccacccctttactgactgtcccatccaccgctttataggcggtttcgccgttgctgccggggataggtgtaccggtggactgagcgacattatcctgctcaatacggaagatggctaacgtggtggtcagacggctattcatccagtcgcttttcagacccagctcgtagttgttaccggtgattggagccagatatttgccactactgtcacgatcattttgcggctggaaaatagaggtatagctggcgtaggtgctccagttgtcattgatgtcaaacaccagaccagcgtaaggcgtggtgtggtttttctccatgctgtaagtcagcgtatcaacccgccagttggtataacgtgcgccgaggatcagatgcagcggatcggcaagggtgacacgagtggcagcatataagcttttcatatgtgtggtatcgtcctgcgccaggctctgtggactccagtcggtttgtgggaaattgccattaaagttgtagaaactgccaatttcatccgggaagatgttggcccaactactgaagtaacgattgttttgtttgctgtaactgccaccaaacattagattgtgctgacgaccaaacaattcataactaccgtcagcgaacaaatccagcgcatcaactttacgtttgccactgttccaaccggtgccgccgacataatcaaagccaggtccataattactgtatggcccaaccagcataccatccgctttgtttacataggcatcgacatacatcattttgctgtcaaattcgacttcagagtgggtggcattcagtgtcgcttgccaggtatcagcaaactgctgcttcagggtcataaagaccttgttgatctctttatcgttgtacgcccagtcaggtgcggtactgcgtgcgcgatcgtaactgttgctgctgccatcagtattccagcgcggtaaaccgccccaggtagggctattaacatcaatgcgctgatattcgtaaccggcactaagcgtcgtaagatcgcctaaatcagcatcgacaatgccgctgaagaaggtcttttcactgttgtagcggtccagccaactgtcgttattctggtagccgccgacaattcgcgcgcggattttaccgtcttcggtgagtgggctttgtaaatccgccacataccgttctttgttccagctaccgtattccgcgctgacatcgcctttaaattcacgactggtcgcgtgttttcgaaccatattaattgccgcagatggattacccgtcccggtcatgagtcctgtcgcgccacgcactacttctacgcgttcaaagagtgccatatcagaaagtgcgtcgcccagattccagcggctttcaaaataggtggggataccatcaaccatatagttatcgatctggaatccgcgggaataataaagagcacgatcggaatccgcctgacttttgctgatccccagcgtgttttccatcacttcgcccagcgtttgtaactgctgatcttccatccgctgctggctaacaatagtgacgctctgaggaatatcacgttgagtcatctgcattttggtacccgcagaggtagacgttacgctgtaatcattttcgccatcatctggagctgtggcactaccctcaacaatcaccgtttcttcagtggctggtgcagcaaaagcggcagaaggtaatagtgccagtgctatgcaaccggcaagtagactcggtttggtgatggcttgatattgattatccctgttaaattgtgtactaagcatttgaaatctcttggtttatgttgtcgtcaggctcatgccggaggagggtgatgagcgattatatttagtgtgcgaataattttgtttgtaaatgcaaatgagaaatatacgcattcatatttgtcatgtaaaccaaacagagaatgtcttttcagcgcattcgcaggcagaaatgggaataatggcgatatatacggcagcaaaacgattttttgcttaagaaatcgtgagttaaggttgaaagagcaggtttaactcgaccatactctatactcgcagtgtggcgcggcgtagcatggcgcaacgcatggctatttgaaaaaggaaaatgtcgtggcagaagaaactatattcagcaaaattattcgtcgtgagatcccctccgatatcgtctaccaggatgatctggtaacggcgtttcgcgatattagcccgcaagcgccaacgcatattctgatcattccgaatatcctcattccgactgtgaacgacgtcagtgctgagcatgagcaggcgctgggacgcatgatcaccgtagcggcaaaaattgctgagcaagaaggtattgccgaagatggctatcgtctgatcatgaataccaaccgccatggcggacaagaggtttaccacatccatatgcacttgttgggtggccgtccgctgggaccaatgctggcgcataaaggtctgtaacgatgagaaaaggatgctttgggctggtgtctctggtgttgttactgctggtgggctgtcgtagtcatccggaaattccggtgaatgatgagcaaagcctggtgatggagagttctttattggctgcgggcatcagtgcagaaaagcccttccttagcacgtctgatattcaacctagtgcatccagtacgctttataacgaaaggcaagaacccgttaccgttcattatcgtttttactggtatgacgccagagggctggagatgcatcctctggaaaggccacgcagcgttaccattcccgcacatagcgcggtaacgctgtacggcagcgccaattttctgggggcgcacaaagtcagactttatctatatttgtaaggggtgaatcttgatgacaaaaatgagtcgctacgccttgattaccgcgctggcgatgtttctcgccgggtgtgtggggcaacgtgaacctgcaccggtagaagaagtgaaaccagcgccggaacaaccagccgagccacaacagcctgtccccacagtgcccagcgtgccgacgatcccgcagcagccaggcccaattgagcacgaagatcaaactgcaccgcctgcgccgcatattcgccattatgactggaatggcacaatgcagccgatggtcagtaagatgcttggggctgacggggtgactgcgggtagcgtcctgctggttgatagcgttaacaaccgtactaacggtagcctgaatgccgcagaagcgaccgaaacgctgcgaaatgcgctggctaataacgggaaatttaccctggtttccgcccagcaactgagcatggcgaagcaacagttaggtttgagcccgcaggacagtttaggcacccgtagtaaagccataggcattgcccgcaatgtcggcgctcattacgtgctgtactccagcgcctctggcaacgttaacgctccgaccctacaaatgcagctgatgctggtgcagacgggcgaaattatctggagtggtaaaggtgccgttagccagcaataagtaaaattatctggtcaggtaaaggtgccgtttcgcagcaataatcccatcacgcgcgacgaattgctgagccgctttttcccgcagtatcatcccgtcacgacgtttaatagtgggcttagtggcgggagttttctcattgaacatcagggccagcgttttgttgtgcgtcagccgcacgatcctgatgcgccgcagtccgcgttcttgcgccagtatcgggctttaagtcaactacccgcatgcattgcaccgaagccgcatttatatctccgtgactggatggtagtcgactatctgcccggcgcggtaaaaacgtatttgccggataccaacgaactggcaggcttgctgtattatctacatcaacaaccacgttttggctggcgaataacgctgttgccgttactggaactgtactggcagcaaagcgatccggcgcggcggacagtgggttggctgcgaatgttaaaacgtctgcgcaaagcgcgggaaccacggcctttacgcttaagtccattgcatatggatgtccacgccggaaatttagtgcatagcgcgagtgggttaaaactcatcgactgggagtatgccggagatggtgatatcgcgctggaactggcggcggtgtgggtggaaaatactgaacagcaccggcaattggtcaatgactatgccactcgcgcgaagatttatccggcgcaattatggcgtcaggtcaggcgatggtttccctggctgctgatgctcaaagcagggtggtttgagtaccgctggcgacaaaccggcgatcaacaatttatcaggctggccgatgacacctggcggcagctattaataaaacaataaggagagcagtgtgggtccagtaatgttggatgtcgaaggttacgaactggacgcggaagagcgtgaaatactggcgcatccgctggtgggagggctgattctctttacgcgtaactatcatgatcctgcccagttacgtgaactggtgcgccagatccgcgcagctagccgcaatcgtctggtggtggcggttgatcaggaaggtggacgcgtgcagcgttttcgtgaaggttttacccgcttgccagcggcgcaaagtttcgctgcgctgagtggaatggaagagggtggcaaactggcgcaggaggcaggttggttgatggccagcgaaatgatcgctatggatattgatatcagctttgcgcctgtgctggatgtcgggcatatcagcgcggcgattggcgagcgttcttatcatgccgatccacaaaaagccctggcaattgccagccggtttattgatggtatgcatgaagccggaatgaaaacgaccgggaaacacttcccaggacacggtgcagtaacggcagacagtcacaaagaaacaccgtgcgatccacgtccacaagcggagattcgcgctaaagatatgagcgtcttcagttccttaatccgcgaaaataaactcgacgccattatgcctgcgcatgtgatctacagtgatgttgatccgcgtccggcgagcggttctccctactggctgaaaaccgttttgcgtcaggaactgggttttgacggcgtgattttctctgacgatttaagcatggaaggtgccgcgattatgggcagttatgccgaacgcgggcaggctagtctggatgcgggttgcgatatgatcctggtctgcaataatcgtaaaggggccgtcagcgtgttagataatctgagtccgatcaaggcagaacgtgttacacgtttgtatcataaaggtagttttagccgacaggaactgatggacagcgctcgctggaaagcgatcagcacccgtctgaatcagttacatgaacgctggcaggaagagaaagcaggtcactaaccctggcttatgtgaggaagcgatgattatctatttacacggttttgactctaacagtccgggtaaccacgagaaagtcttacaattgcagtttattgacccggatgtacgcttgataagctacagtacgcggcatccgaaacatgatatgcagcatctgcttaaagaagtggacaaaatgttgcaactgaacgttgacgagcgtccgctaatttgcggcgttggcttgggcggatactgggcggaacggattggttttctttgcgacatccgccaggtgatcttcaaccctaatttgttcccttatgagaacatggaaggcaagattgatcgcccggaagagtatgccgatattgccactaagtgtgtgaccaacttccgtgagaagaatcgcgatcgttgcctggtgattttgagccgtaatgatgaagcgcttaacagccagcggacatctgaagagttgcatcattattacgagattgtctgggacgaagagcagacgcacaaattcaagaatatctccccgcatttacagcgcattaaagcgttcaaaaccctcgggtaaatgccctcgtcgcatcaggtaaccttgccggtacctgatgcgctccgaattctgtgggtcggataaggcgtccacgccgcatccgacagtcgagcatcaatgcctgatgcgcttcttatcaggcctaccgaacgccctgcatacacccctcactctatatcactctcacaaattcgctcaaataataaacaataaactctgttttttgatctcacccggtaaagtcgcctatcttttcagcaacaaaacttgattaacatcaattttggtatgaccaatgcaccattcatgttattctcaatagcgaagaacattttcattgctgtaacctgttgttaattaagagctatgttaataaccattaattaacaattggttaataaatttaagggggtcacgttgactacgccattgaaaaagattgtgattgtcggcggcggtgctggtgggctggaaatggcaacacagctggggcataagctgggacgcaagaaaaaagccaaaattacgctggtcgatcgtaaccacagccacctgtggaaaccgctgctgcacgaagtggcgactggcagccttgatgaaggcgtcgatgcgttgagctatctggcccatgcgcgcaatcatggtttccagttccagctgggttccgtcattgatattgatcgtgaagcgaaaacaatcactattgcagaactgcgcgacgagaaaggtgaactgctggttccggaacgtaaaatcgcctatgacaccctggtaatggcgctgggtagcacctctaacgatttcaatacgccaggtgtcaaagagaactgcattttcctcgataacccgcaccaggcgcgtcgcttccaccaggagatgctgaatttgttcctgaaatactccgccaacctgggcgcgaatggcaaagtgaacattgcgattgtcggcggcggcgcgacgggtgtagaactctccgctgaattgcacaacgcggtcaagcaactgcacagctacggttacaaaggcctgaccaacgaagccctgaacgtaacgctggtagaagcgggagaacgtattttgcctgcgttaccgccacgtatctctgctgcggcccacaacgagctaacgaaacttggcgttcgcgtgctgacgcaaaccatggtcaccagtgctgatgaaggcggcctgcacactaaagatggcgaatatattgaggctgatctgatggtatgggcagccgggatcaaagcgccagacttcctgaaagatatcggtggtcttgaaactaaccgtatcaaccagctggtggtggaaccgacgctgcaaaccacccgcgatccagacatttacgctattggcgactgcgcgagttgcccgcgtccggaagggggctttgttccgccgcgtgctcaggctgcacaccagatggcgacttgcgcaatgaacaacattctggcgcagatgaacggtaagccgctgaaaaattatcagtataaagatcatggtagcctggtaagcctgagcaacttctccaccgtcggtagcctgatgggtaacctgacgcgcggcagtatgatgattgaaggacgaattgcgcgctttgtatatatcagcctataccgaatgcatcagattgcgctgcatggttactttaaaaccggattaatgatgctggtggggagtattaaccgcgttatccgtccgcgtttgaagttgcattaatcgacgtacactggcggatgtggcataaacgcctcatccgcccttgaggaacagcgcgatcggcagccgcgttgtatcaggcatcctttcagactcctccgaatccttaagtatttccagccattcccgcgcttttcatcttctgtctgatagctgcttttctccttcgcttgcatgattggcataactgcaaagaaggaggtgttcccgtaaataaaagtatgttggcgggtatcgggattggtgtcgcagctgcgctgggcgtagcggcagtggccagtctgaacgtgtttgaacggggcccgcaatacgctcaggttgtttctgcaaccccaatcaaggaaacggttaaaacaccgcgtcaggagtgtcgcaacgtcacagtgacccatcgtcgaccggtgcaggatgaaaatcgcattaccgggagcgtgctcggcgctgttgctggcggcgtgatagggcatcagtttggtggtggtcgcggtaaagatgtcgccactgttgtgggggcgctgggtggtggatatgccggtaaccagatccagggctctctccaggaaagcgatacttacacgactacgcaacagcgttgtaaaacggtgtatgacaagagtgaaaaaatgctcggttatgatgtgacctataagattggcgatcagcagggcaaaatccgcatggaccgcgatccgggtacgcagatcccgctagatagcaacgggcaactgattttgaataacaaagtataacaaggctgtactctgcaatttggcccctcattcgctcaggctgaggggctttttttgcgacttatttcaccagttcgggccataaacgcaaagtcgttccggcaatctgcatcagtttttccaggcttgcaccttcgcgtgcgctgatgctcatcccctgaataatacaattaaggaattctgccagatgtgtcacgtcacagtggggcgggatttccccgcgcgcttgtcgttgacataaaaactgctgcaaagtgcgctcttgcatcgcatggcgacttttcaacgtattggcgatatctccactatctggggagagggtggtgcagttgttgatcatgaagcagcctgccggggtgtctttgctggtaaagcagttggcgatggcagcaaaatagtcagccagcgcagactccacgcttttctcttcacaaaacagctgtgcttcatgcttagcggcaaaacgatcgatatagcggtcgagaacggcacgaaataacccctctttgttggtaaattccgcgtatagcgtgggcgctttggctccggtcgcttcgacgaggtccgcaagagaagtcgcttcataaccgtgttgccagaacaatttcatggccttatcaagcgcggcatccctgtcgaacacttttgggcggccacggcttttttttacacattgtgtactgtcagttgccatgatgccgttgtacctggtgactgtgaatgaaaggttattataaaaataatcacctccgttcaccagtccagatcccataaaaataattgctttctatttaactgaaatttaaagatttttaaattaattaatgattgttataaaaaatatcttgtatgtgatccagatcacatctatcatttagttatcgatcgttaagtaattgcttgcgacgtcattcatctgcataaggccactattatgaaaaacgtaaaaaccctcatcgctgcggcgattttaagctccatgagttttgccagctttgcggctgtcgaagttcagagtacgccagaaggccaacaaaaagtcggtacaatcagtgctaacgcggggacaaatctgggaagcctggaagagcagctggcgcaaaaagcggatgagatgggcgcaaaatctttccgtattacttctgtaaccggtccgaataccctccatggaacagcagtaatttataaataagcattaaccctcattaatgcctgctactgctgattttttccccgcgacatgccgtgtcgcggggatttttttatccgggctttacagcgtttgtgggctcacttgatgacggcggacatccaccggcatcccggaacggacatccatcacatgttgcatcacttcagcgtcagtttgtgctgcatctttaaaactttgcattgcgctattcagcgtaattggcagcagctgcggatcgtcatcaatcttctcactcagcggctgatgtacttcaaccagacgcgcaccgtttggttcggcagagacttttatcggagtgttgatgatattcactttggtgcctggggtgacctggctaaagagtgttttgatatcgtcatcccgcagacgaatacagccagaacttacccgcatgccaatgccgaaatcggcgttcgtaccatgaagcaaataaacgccgccataggccgccagacgaatcgcatgatggcccattgggttatccagtccagccggcactaccgcaggcaactcaattccctgtgctttataacgggcgcggatgtttgccgttggcgtccaggttgggtttgcacgtttgtcactaacggtggtcaccattgtcggtgtcagcgtgtcaccacctaactgaccaatacctattggatacacggttacgctatttttacccggcgggtagtaatagagacgcagctccgcaatgttgatcacaatgccttcgcgcggcgcatctggaagtagggtttgcaacgggatcgttaacacgctgcccgcgcgcggtacgtaaggatcaacgccggggttagcctgtaacagagcgagaaagccgacgttgtattttttggcgatggcttccagagaaccaccgtcattttccaccacatgaaatttgttttcgccaaccagacgactgcccgctggcggcagcggccaggtgttggcttttgccggtagcgccagcgccacggcagcggcgaacgtaaaaaacgttagccagcgagaaaaacgcgttttgatcatcaccaaaaatccataataaatataaggttattgtaataaacagataagcctgaattatggatggtgacagtgtcggatagtgcagggaagtgcaaagaatttgtaaatgttgcagatgggggcgcagaaacgcccccgatttaccattaagcgatcgcgttctcttccagttcacgcataaactggcgtacccattcgatacgcgttttccgctcactcaaatcctgaataaatttcaggcgcgtcggaccatcaaggcggtaatgctgcggctgtttttgcagcaaaccaatcaaccaggccggattaacgtgattcttctcggcaaattcgatcaccccgcctttctcattaccttccagcttcctgatccccagtttctgcgcttgctggcgcagacgggcaatatccagcagggtacgcgccggatctggcagcaggccgaagcgatcgataagctcgactttgatctcttccagttcgttttccgttttggcgctggcaatacgtttgtagaagctcagacgcgtgttcacgtcagggatgaaatcatctggcaataggctcggcatccgcagctcgacttctgtttgctggctggtgagatcttccaggctcggctcgcgtccggctttcagtgcatcgacggcgttttccagcaactccatatacaggctgaaaccgatggtttccatactgccgctttgttcttcgccaagcagttcacccgcgccgcgaatctccagatcgtgcgttgccagcgcaaaacctgccccgagatcttccaggctggcaattgcttcaagacgtttttgtgcatcggtagtcatcgcttttggatgcggtgtcagcaaccatgcatatgcctgatgatggctacgtccgacgcgaccgcgtaactggtgcagctgcgccagaccgaagtgatccgcgcgttcaatgataatagtgttggctgtcgggatgtcgatcccggtttcgataatggttgtacaaaccagcacgttgaaacgttgatgatggaaatcattcatcacccgttccagttcgcgctcgcgcatctgcccgtgaccgatggcgatccgcgcttctggcaccagttctgccagccgttcggcggctttctgaatgttttccacatcattgtagagataataaacctgtcctccgcgcaaaatttcacgcaggatcgcctcccggaccaccatgctgtcatactcacggacaaaggttttaactgccagacgacgggcgggcggcgtggcgataatgctcaggtcacgcattccgctcattgccatattcagcgtacgtgggatcggcgttgcagtaagcgtcagaatatccacgttcgcgcgcatcgctttaatgcgctctttatgacgcaccccgaagcggtgttcttcatcgacaatcagcaggcctaaatctttaaacttgacgtcactttgcagcagtttgtgcgtaccgatcagaatatcgattttcccttccgccacttccgcaaggatttgcgtctgctctttggcgctgcggaaacgggagatcatttcgatacgtaccggccagttggcgaaacggtcgcggaagttgtcgtaatgctgctgcgcgagaagggtggtaggcaccagcaccgccacctgcttgtggttatctactgccaggaaagctgcgcgcatcgccacttctgttttaccaaagccaacatcgccgcacaccagacgatccattgccagcggctgacacatgtcgctaagtaccgcattaatggcctgcgcctgatccggcgtggtttcaaacgggaagctgtcgcagaacaactgatactgctcacgatcgtgtttaaacgcgaagccctctttggcggcgcgttgcgcgtagatatccagcaattccgccgccacatcacgcactttttccgccgctttctgccgcgcgcgactccacgcatcgccgccaagtttatgcagcggggcgttttcttccgcgccacctgcgtaacggctaatcagatgcagactgctcaccggaacatacagtttggcgtcgttggcataggtgagcatcagatactcgccagtaatgccacccgcttccagcgtggtcattccggcataacgaccgacgccgtgctccagatggaccaccggctgaccaatatgcagttccgcaaggttacggatcagtgtatcggggttgatggtgcggcgagaatcctgacgacgacgggcaacgcgttcaccgagcagatcgctttcgcaaatcagcgccagattacgcaccgtatcgacaaaaccatgttcggcagcgccaatcatcagataacgcccacggtcgctggcttcatcaagacgcataatgcgttgcggagcaattttaattcgtgcgagcagttcacccagcgcttcacggcgaccttcactttctacgctgaacaccaccggaccgtcgaaagtctcgaggaacttacgcagcgcatccagcggcgctttttgttgtgcctgaacggccaggtctggcagtttctggaaacctaaattggcattcgcggcttttgtcggtaaatgttcagtttttagctgcacccggggccagtttttcagctcactgaagagctcgtccacccgcagccagaggctttgtggtggcaacagcgggcgcatcggatcgacgccgcgattctcaaaacgcgccagcgtgtcagcctggaaacgttcggcactggtttccagatcgccagtattcacgagcaaggtattggcagggaaataactgaacagcggcggcagtggttcgctgaagaacaatggctgccagtactcgatcccggcaggtaatgtgcctttactcacttgctggtaaatatgttctggatcgcgcttcacttcgaaggtatcgcgccactggctgcggaacagttcaattgccgctttatcggtcggaaattcgtgcgcgggcagcagattgatcgcttctacttcctccagcgtgcgctggctgtcgacgtcaaacacccgcaggctgtcgatttcatcatcaaagaaatcaagacgataaggcagctcactccccatcgggaagagatccagcaacgcgccgcgcgtggcgtattcgccgtgctccatcacctggtcaacatggcgataaccggcgctgtccagttgggttcgtaatgcatctcgactcaggcgctgaccttttttcatcaccagcgcatgaccgtggagaaaactgtgtgggcaaacgcgctgcataagcgtattcaccggaacaatcagtacgccacgctgcatcgtcggtagctggtaaagggtggaaaggcggctggagataatgtcctgatgagggctaaaactgtcgtagggaagagtttcccagtccgccagattcatcaccatttgatcggtaaactggctgatttcatcatgcaaacgcagagcattttgcatatctggtgcaatgagtaccaccggaccggcgtgacgttcggcaatttccgctaccagcgttgcacaggctgcgccggttaactcgcccagcagacgctgctcacccgctttgacgggcagcgtataacgatattgttcaggcataacggttgtcagattctcgttaggatatgcctcaacatatgggggcatatctctgataagcaatgctgttcattatccgtaatcgacatggtttagcaaattgaatcgccccggctggggcgatggcttagcgggagtaactgacggcagcgggcagactaggcggggagaacaacagatcgctgaatgcacgctgactaagttttcttaccagcaagcccgcaacagtacagatgaacaaactgacaaagggataaaccagcaggagtgtcagttcgacttgcgggctccagcgtgctgcgttcatttgcgcaagcagagttaagctgaatatttcaaccagaatgcgatgggtggtgtagatagcaatggtgttggagccaatcacattcagcaggctggtggagcgcataccgaatcgttgctcgtattgataaaacagcttcatgatcaccacaatgcttaccaggctcaacagcaggctgatagtaaacaaccaggcaccgaccgccagaacggtaagcaaagaagccatcagcagatggcggcgcaacggcacctctttaacacaggtcattattgttgcgccaaaccatgcgccaaggctgtaataaggcaaattgcggatcacactgttcattccccaccacggcgtgggaacgaaattaaccgccacactcagcagtacaaacaaggcgaatagtggcagcgccagacggctaaaaattttacataccacgaaatagacaattaacgcatacagataccacaagctggtgctggcggtgatcatcccgtgcaggaactcaccggtggaatcggcataagcggcattggaggcattgcttaaatcgcgctcaggtgccagccactggttcagcgcacttaacgccagccactgcaccacgccccaaagcgccagcacccagaagatgttccagatccgtttatcgagacaatttccccacggtacgctgtcgatatagcggcgaatcaaatagccggatataaagaaaaaaaccggcatacgaaagggggcaaggtaaagattgaaatagatccagcatttgctcaggacttcgcttaacggatgctgaaaagtggtcagatgcggataaaaggtaatgacgctgtgataaatcaccaccagacaaatacataaccctttgatctggttaatccatagctctttttgtttcatcaggacaacacgctcttttttaatttacatgcggttgatcctgcgggttatgacccgaggtgtaatgggtatctgtctgtattggatgatttttcagattaagatcaggcggcaagattgatgataaaacatggcaatttagccgattgatttacgggggcttttcagattagccctgacgatcacttacagttcagacgtttacccatcttgctttcgcttatatactcgtgtctttgctacagcaaccagacggatttcatgtaccaacctgtcgctctatttattggcctgcgttacatgcgtgggcgtgcagcggatcgcttcggtcgtttcgtctcctggctttctaccatcggcattaccctcggggtgatggcgctggtcacagtattgagtgtgatgaacggctttgagcgcgagctgcaaaacaacatccttggcctgatgccacaggcaattctctcttctgagcatggctctcttaacccgcagcaactcccagaaacggcagtcaaactggacggcgttaatcgcgtcgcacctattactaccggtgatgtggtactgcaaagcgcgcgcagcgtggcggtcggggtgatgctcggtatcgacccggcgcaaaaagatccacttacaccgtatctggtcaatgtgaaacaaactgacctcgagccggggaaatataatgtcatcctcggcgaacaacttgccagtcagctaggcgttaatcgcggtgatcaaatccgcgtgatggtaccatctgccagccagttcacgccgatggggcgtattccaagccagcgcctgttcaatgtgattggcactttcgccgccaacagtgaagtcgatggctatgaaatgctggtgaatattgaggatgccagccgtctgatgcgttatccggcaggcaatattaccggctggcgtttgtggctggatgagccgctgaaagtcgacagtttaagtcagcaaaaactgcctgaaggcagcaaatggcaggactggcgtgatcgtaaaggcgagttgttccaggccgtacgcatggaaaaaaatatgatgggtttactgctgagcctgattgtcgccgttgcggcgtttaacattattaccagtctagggctgatggtaatggagaagcagggcgaagtagcgatcctgcaaacgcaaggcttaactccgcgacaaatcatgatggtctttatggtgcaaggggccagcgccgggattatcggtgcgatcctcggagcggcgcttggcgccctgcttgccagccagttaaataatctgatgccgataatcggcgtcctgcttgatggcgcggcgctgccggtggctatcgaacctttacaggtcattgttattgcgctggtggcgatggctatcgcgctgctgtctacgctttaccctagttggcgcgctgccgccactcaacccgctgaggctttacgttatgaataagatcctgttgcaatgcgacaacctgtgcaaacgctatcaggaaggcagtgtgcaaaccgatgtgctgcacaatgtcagtttcagcgtcggcgaaggtgaaatgatggcgatcgtcggtagctctggttccggtaaaagtaccttgctgcacctgctgggcgggctggatacgccaacctccggcgatgtgatttttaatggtcagccaatgagcaaactgagcagcgcagcgaaagctgaactgcgcaaccagaagctgggctttatttatcagtttcaccacctgctgccggattttaccgccctggaaaacgtggctatgccgctgctgattggcaagaaaaagcccgctgaaatcaacagccgtgcacttgagatgttaaaagcggtggggctggatcatcgtgcgaatcaccgcccatctgaactttctggcggcgaacgccagcgtgtggcgattgcccgtgcgctggtgaataacccgcgcctggtactggcggatgaacctaccggtaacctcgatgcgcgtaacgccgacagcatcttccagttgcttggggaattgaatcgcttgcagggcaccgccttcctggtggttactcacgacctgcaactggcgaaacgtatgagccgccagttagaaatgcgtgatggtcgtctgacggcggaactgagcctgatgggggcggagtaatggcgatgcctttaagcttattaattggcctgcgttttagtcgcggacggcggcgcggcggcatggtgagcctgatctccgttatttctaccattggcattgccctcggcgtggcggtattgatcgtcggcttaagcgcgatgaacggctttgaacgcgaactgaacaaccgtattctggcggtggtgccgcatggtgaaatcgaggcggtggatcagccgtggactaactggcaggaagcactggatcacgtgcaaaaagtgccgggtattgccgctgccgcgccgtatatcaatttcaccgggctggtggaaagtggcgcgaatcttcgcgcaatccaggtgaagggcgttaacccgcaacaggaacagcgtctgagcgcattacccagctttgtccagggcgatgcgtggcgcaattttaaagcgggcgaacagcaaattatcatcggcaaaggcgtggcggatgcgctgaaagtgaagcagggggattgggtgagcattatgatccccaacagcaatcccgagcataaactgatgcagccaaaacgtgtgcgtttgcacgttgccggtattttgcagttgagtggtcaactcgatcacagttttgccatgatcccgctggcggatgcccaacaatatcttgatatgggttccagcgtgagtggtattgcccttaaaatgacggatgttttcaacgccaataagctggtacgcgatgcgggtgaagtgaccaacagctatgtttatattaaaagctggattggtacttacggctatatgtatcgcgatatccaaatgatccgcgccattatgtatctggcgatggtactggtgattggcgtggcctgtttcaacatcgtctccaccttagtgatggcggtgaaagacaagagtggcgatatcgcagtattaagaacgctgggggcgaaagatggtttaattcgcgccatctttgtctggtatggattgctggcagggctgttcggcagcctgtgtggtgtgattatcggcgtagtggttagtctgcaacttaccccgattattgagtggattgaaaagttgatcggtcatcagttcctctccagcgatatctattttattgatttcctgccaagcgaattgcactggctggacgtcttctacgtactggtcacagcattgttgctgagtcttttggcaagttggtatccggcgcggcgcgccagtaatattgaccctgcgcgagtccttagcggccagtaaaggcagtacattaaaacaaggagcggcaatgtattacgggtttgatattggtggaacaaaaattgcgcttggcgtgtttgatagcggtcggcagttgcagtgggaaaagcgggtgccgacaccgcgtgacagctatgacgcatttttagatgcagtgtgtgagctggtagctgaagctgaccaacgttttggctgtaaaggttctgtcggcatcggtattccgggaatgccggaaacagaagatggtacgctgtatgccgccaatgtccccgctgccagcggtaaaccgctgcgtgccgacctgagcgcacgtcttgatcgcgatgtacgccttgataacgatgccaactgttttgcccttagtgaagcctgggatgatgaatttactcaatatccactggtgatggggttgattctcggcaccggtgttggcggcgggctgattttcaacggcaaaccgattaccggtaaaagctacattaccggcgagtttggccatatgcgtctgccggttgatgcgttaaccatgatggggttggatttcccgttacgccgctgcggctgtggtcagcatggctgcattgaaaattatctgtctggtcgcggttttgcgtggctgtatcaacactattatcatcaaccgttgcaggctcccgaaattattgcgctttatgatcaaggcgatgagcaggcaagggcgcacgttgagcgttatctggatttattagcggtttgtctgggaaatatcctgaccatcgttgaccctgacctggtcgtcattggtggtggcttaagcaatttcccggcaatcacaacgcaactggcggacaggctgcctcgtcatctcttacctgtagctcgtgttccgcgcattgaacgcgcgcgccacggtgatgcgggaggaatgcgtggtgcggccttcctacatctaaccgattaaacaacagaggttgctatgctgagccgtcggggtcatcggttaagtcgttttcgtaaaaataaacgccgcctgcgcgagcgtttgcgtcagcgtatttttttcagagataaagtggtgccggaagcaatggaaaaaccaagagtactcgtactgacaggggcaggaatttctgcggaaagtggtattcgtacctttcgcgccgcagatggcctgtgggaagaacatcgggttgaagatgtggcaacgccggaaggtttcgatcgcgatcctgaactggtgcaagcgttttataacgcccgtcgtcgacagctgcagcagccagaaattcagcctaacgccgcgcatcttgcgctggctaaactgcaagacgccctcggcgatcgctttttgctggtgacgcagaatatcgacaacctgcatgaacgcgcaggtaataccaatgtgattcatatgcatggggaactgctgaaagtgcgttgtagtcaaagtggtcaggttctcgactggacaggagacgttaccccagaagataaatgccattgttgccagtttccggcacccttgcgcccgcacgtagtgtggtttggcgaaatgccactcggcatggatgaaatttatatggcgttgagcatggccgatattttcattgccattggcacatccgggcatgtttatccggcggctgggtttgttcacgaagcgaaactgcatggcgcgcacaccgtggaactgaatcttgaaccgagtcaggttggtaatgaatttgccgagaaatattacggcccggcaagccaggtggcgcctgagtttgttgaaaagttgctgaagggattaaaagcgggaagcattgcctgatgcactacgcttatcaggcctgcaaggggacgcaattaattgaatttgcgggttttgtgggccggataaggcgttcgcgccccatccggaataatacacgcgcacttttccggcctcttttatcgtttactcgtcaataacaatgcggcaataaacgtacagacaccaattagccctgcccagagtgggcttattctggtaatcgcaaagctattatcgatatacaaacataaagcctgataacccatattggcaatagtcatcgccactgcaaattttaacgcataaataaaacgagtcgtgtagtaaaagatcctggaaaataagataaacgtcgcagcccaggcgataaaacctaatgtgttggtgctgccggggggagcattttcatgctgttgtcctggatgcggataatacgttagtggcggcgtgctttgttttaatatctgtgcttgtagaacagccaatgcattattgattccctgataccagagatctgcatttaaataagccagcgtgtgattttctatcagaaggccgagatgtttatcgtccagaccactttcaacctggccgttggtgatcataattaaccgtggttcgcgggtagtaaatagtaacagaacacttccttttacatcactcaaactagaactcgcatgcgccagcatcgctttaccattttgtctgagactggcttcattattaatgtcgggtaaaaccacaataaacggtgcaattcccgtttgttggcgaaaaagctcggctttatgcgcgatctcttcagcatctggtacagtaccggtaacgtccgtaaaaagtgtcttcattattggaattaatggcttgctggctgctgtcagaggcaggagtatcagtaaactgagcagtataatgaattttttcatgggcgggacttccgtttcctgcgactttttttagaggagggcatacttattaataaaccgacggcgataaaaataacgcccataatgccgataaacccccatttaaaaaaattaacccacgggttatttatctcagccttttcaggatgcccgggagaataataaacattaactttatcgccttcgctgtcttcataaaaatcgctgccgatactgctattgaaaattagcgtgtaatctggcgtcggtcgaaaggcaacgacgggataccagctaccatctttacccgtgcgatgagaatgactggagtgccagacggtatcaacaatgacgccttcggtatgaatcgcgtctttgctataggtgaactggttataaaagacaacaacagaaatgaggatcagtaccagaccgataccgaggaatatacgaaagaaaactttactgtcctgactcattagccacatccttgctaactaaaaaacgggcggtaataccaccgcccgcttgctgaattaacgtcctgctttcagcttctgataatactcttcataaatgctgctggctgcgccaacgtcattctgccattcgccatttttaatggtttcagcatccgggtagagtgttttatcgttcgccacttctggacttaacagcttacgcgccgcaaggtttggcgttggataaccgatagtttcagcaacctgttttgccacatccgggcgcagcaggaagttgatcaatttcagcgcgccttctttgtttttggcatttgccgggatcgccaggctgtccatccagaaaatgccgccttctttcggccacaccacgtcaattggcgtacccgcctggcgtgcaacgaaagcagaaccgttccagatcatgccgaggttaacttcgccttccatgtacgggttcgccgggttatcggagttaaaggctgccacgtttggcatcagttttttcagctcgttatatgcagcttcaatctctttcggatcggtggtgttaccggagtagcccagcttacgcagcgccatctggaacacttcacgggcatcgtcggtcaacagcaggctgcctttgtactctggcttccacagatcggcccagctggtgacagatttcggatccaccgcatcaccgttaacaccaatcgccgtcgcaccccagatatacggaatggagtagtcgttattcgggtcaaaaggcttgttgagcatgtctggatcgagattgctgaagtttgttaacttgctcttgtcgatcttctggatcatcccttctttacgcattttatcaacgtaataggtactaggaaccaccagatcataggcaccgtctttgtatgttttcagcttggcgtacatggtttcgttgctctcgtaagtgctatagataaccttaataccggtttctttggtgaactgttcaagcagtcctggcggcacgtactcggtccagttgtagaaatacagcgtgttgttgtcatcggcgtgagcggcgctcatgcccagtgccagagcacccgccgcgagcaggtggcgactccattttttcatttaacgtcccctgtgttacctttcgttttatcacgagcaataagctggctggcaataaccatcaccaggctcagcaccagtaatatggttgccagcgcgttaacttccgggcttacgccgactttgaccatgctataaatttttaacggcagaatttcataacttggtccggtgacgaagctagaaactaccacatcgtccatgctcagggtaaagcttaacacccagcccgccgccaccgctggcattgccagtggcagaatgatttttcgcagaatggtaaattcgctggcaccgagatctttcgccgcttccagcattcgcacgtcaaaacctttcaggcggctatacaccgtcaccaccacaaatggcaggcagaaggtgatatggctgaacagcaggctccagaagccaagctgaatacccagcagcataaacagcaccagcaggctaatcgccatcacgatatctggactcatcatcaccacaaacagcattccgctaacgaacggcttaccacgaaagcgataacggtacagcgcaactgccgtcagactaccgataagcgtagcaaacgtcgcgctaaacaccgccattgttagactatgctgcgctgcctgtaacaggctgtcgttgttcatcagcaggctataccatttggtggtaaagccctgccagttgatgccaaagcggctgctgttaaaggagttcacaatcaaaataatgattgggatatacaggtacgcgtagatagcggtcataaaaccgccgcgaagcagtcgaccgatcattcgagttccaccttcttattcagcaaacgagaagcgcgccagtaaaccagcaacatcaggcccattacgatagtcagcgtaatgctggtagctgcaccaaacggccagtcacgaatattaaggaactggaccttgatgacgttaccgatcagcaggtttttcgcaccgcccatcaggtcggatacatagaacaggcccatcgctggcagcatcaccagcagacatccggcaataattcccggcatcgtcagtggaataatgatacggataaaagtctgtaacttgctggcaccgagatcgcgcgccgcctcaagcaacggcttatccagtttttcgatactggagtacagcggcatcaccataaacggcagcagaatgtaaaccagaccgataatcaccgcactgggcgtgaacatgatacggattggtgtgtcgataacgcccagccagagcaaaaactcgttgagatagcctttggtgctgaggaaaattttcagcccgtagatacgaattaaactgttggtccagaacggaacaatcagcagaaacagcagcagcggacgcaccttgtgtggcaacttcgccagaaaccaggcaaacgggtagcccagcaccaggcaggcgagggtggcgatcagcgccatattcaggctgtgcaatagcacttcaaaatagagcggatcgagcagacgcgtgtagttatccagcgtaaagaccattttgacaaaactggcgtcgtcgcgggtcaaaaagctggtgccaatgatcatcaggttgggcagaaagacaaacaacacaagccaaccgacaatagtgacaatcactacattctggaacttacttgtgttcttcatcagccagtacgacctcccagctttctacccaattaatggccattttttggtcgagagagtggtcaaagtcaggatcgtcttcattgaagaattcgctgaccatcaccatcttgccattttccagttcaacaacgctctccagcgtcatgcctttgtagttacgctcgcgaacgtaaccaatcagcccttcagcgtggttgtcgtcgttaatctcttcaacacgtaagtcttccgggcgcagcagaacatgcagtttttgccccggttcaacggcgaagttaacgtagatattacattcgcggccttcaacgttggcgcgtacgcgctgctcgtctagacgttcgatgacagtggcgttaaacatattgatttcgccaatgaagccggcaacaaacaggtttttcggctcttcgtagatttcacgcggcgtgccgtcttgctcaatgcgaccatcgcgcatcaccacaatcctgtcactcatggtgagtgcttcttcctggtcgtgagtcacaaagacgaatgtaatgccaagcttacgctgtaacgctttcagctcgttctgcatttgcttacgcagtttgtaatccagcgcactgaggctctcatccagcaacaacagacgaggcttgttaaccaccgcgcgagcaatggcgacgcgttgctgttgaccaccagagagctgatgcggtttgcgttgagcgaaggtttccaactgcaccatccgcagggcttccatcacgcggggcgtaatttcagcagcgggggttttttgcatgcgcaacccaaaggccacattttcgaacacggtcatgtgggggaaaagtgcgtagctttggaaaacagtgttcacatagcggttttccgccggaacgtgggtgatgtcctcgttatccagcatgatgcgtccggaatcaacagtttccagacctgcaatcaggcgaagaacggttgttttaccgcagccagaagggccaagcagcgtgaggaactcgccattgttgatagtcagatccagctggggaatgacctctttaccatcaaagcatttgcgaattcccgccaattgcaccagcggactaaggctactcggttgtttattcaattttttactctgtcccatgtaaacgcaacggatggcttaccgatgcggggtttgtggttaaccaccttggtgactcttaatgagggcggtaattctacggcaaaccgcttgaatcgccaatctttgttgtgaattactggcttagctttatattcattaaggtaatgctgataaatattcccgcttgcaggggtaaaagtgacctgacgcaatatttgtcttttcttgcttcttaataatgttgtcacaaaaagtgagggtgactacatggataaactacttgagcgatttttgaactacgtgtctctggatacccaaagtaaagcaggggtgagacaggttcccagcacggaaggccaatggaagttattgcatctgctgaaagagcagctcgaagagatggggcttatcaatgtgaccttaagtgagaagggcactttgatggcgacgttaccggctaacgtccctggcgatatcccggcgattggctttatttctcatgtggataccagtccggattgcagcggcaaaaatgtgaatccgcaaattgttgaaaactatcgcggtggcgatattgcgctgggtatcggcgatgaagttttaagtccggttatgttcccggtgctgcatcagctactgggtcagacgctgattaccaccgatggtaaaaccttgttaggtgccgatgacaaagcaggtattgcagaaatcatgaccgcgctggcggtattgcaacagaaaaaaattccgcatggtgatattcgcgtcgcctttaccccggatgaagaagtgggcaaaggggcgaaacattttgatgttgacgccttcgatgcccgctgggcttacactgttgatggtggtggcgtaggcgaactggagtttgaaaacttcaacgccgcgagcgtcaatatcaaaattgtcggtaacaatgttcatccgggcacggcgaaaggagtgatggtaaatgcgctgagcctggcggcacgtattcatgcggaagttccggcggatgaaagcccggaaatgacagaaggctatgaaggtttctatcatctggcgagcatgaaaggcaccgttgaacgggccgatatgcactacatcatccgtgatttcgaccgtaaacagtttgaagcgcgtaaacgtaaaatgatggagatcgccaaaaaagtgggcaaagggttacatcctgattgctacattgaactggtgattgaagacagttactacaatatgcgcgagaaagtggttgagcatccgcatattctcgatatcgcccagcaggcgatgcgcgattgcgatattgaaccggaactgaaaccgatccgcggtggtaccgacggcgcgcagttgagctttatgggattaccgtgcccgaacctgttcactggcggttacaactatcatggtaagcatgagtttgtgactctggaaggtatggaaaaagcggtgcaggtgatcgtccgtattgccgagttaacggcgcaacggaagtaagcgaaaagggatgcggcatgtgatgccgcatccggcttaaatccaaacttacccttcgaagaaccaatacccgctattgaccagcgccgcgagcatcgcgaggaaactcggatcttccagcgcatcgccaaaattctccgcagtcagcgcaatgttgctggcgagtgcatccagtgccggacggtgcggggaatcgatcttctcaccattggcatacacgtcgtcgccaatgcgcaatacgcgcagaccacccaggcgcaccagcacttcaccttgtttcagcgcatcgtagatttcatccggctgataaggcggctctggcggcgcgatatccagttcatgacgactctgggatataaactcgccaaaccattgcttaaagtgttccggctggttgatcaattcgagcatcatctcacgcagtttatccatctcttgcggcagaacatccgcaggatgagcgcgaggtggaacatccggatcgctgtagtagttgccgcccagttcacgttgcagcacataatcggcaaatccactaatcagttcccgcgtatttggcgcgcgaaagcccacggaatagttcatcgcattttccagcgcgtagccttcatgcgggaatcctggcggaatataaagaatatcaccaggctccagctcttcatcgatgatggcttcgaacggatcgacctgtaacagatccggatgtgggcagtgctgtttcatttgcagcttttcgcccactcgccagcgacgacgtccggtaccctgaatgataaacacgtcgtactgatcgagatgcgggccgacgccgccgccgggtacagaaaaagaaatcatcagatcatcaatacgccagtccggtagttcacggaacggtcgcatcagcgcggcggtcggctcatgccagtggttcactgcctgtaccagtaaactccagttggtttcaccgagatgatcgtagctttcgaacgggccgtggctgacctgccatttgccatcctggtgactgaccagtcgactgtcaacttcgctttccatcgccagacccgccaactcgtctggagagatcgggtcaataaaattattaaagccgcgttttaacaccaccgggcgtttctgccagtgacgttcaagaaaatcgggccagttaagagtgagttggtattccatgttaagcatccacaggctggtatctgcaaccgattataacggatgcttaacgtaatgcgtgaagtatgggcatatttattcatctttcggcgcagaatgctggcgaccaaaaatcacctccatccgcgcaccgcccagcatgctctctccggcgacgattttaccctcatattgctcggtgatttcgcgggctaccgccagccctacaccttgcccagggcgtaaagtatcaacccgttgaccacggtcgaaaatgacctctcgcttgcttaatggaataccggggccatcatcctcgaccacaatatagagatgctcgtcggtttgccttgcagaaatttcgacaaactcgaggcaatatttacaggcattatccagcacgttgcccatcacctcgacaaaatcgttctgctcaccgacaaagctgatctctgggctaatatcgagagagatattgacccctttgcgttgatacactttgttcagcgcactggtgagattgtccagcagtggggcgaccggatgcagctcgcggctgagcaatgtcccgccgcgcatactggcacgatgcaggtagtagccaatttgctgactaatgcggctgatttgctccagcattaccggctcagcatcactgacgctcatcttttcactacgcagagaacgcagcgtactttgcagcaccgccagtggcgttttcagactatgggtcaggtcggtgagcgtcgtacggtatttgtcgtaacgttcgcgttcactttttaacaatcggttcaggtttcgtaccagactggtcagttctcgcgttgtggctggattgagcaattcgcggttatgttcttccagttcgcggacttcttttgccagggcttcgatggggcgtaaactccaccaggcggcgacccacagcagcgggatcactaacagcagattggcactgagcacatagataaaccagctccagaccatataggaactttttagctccaccggaatggtatccaccaccacaatggttaattttggcatccggcttgttgccgggtagacgtttactgccacgctgtgggtcatctccgcgtcgtcatcatcttcccgcacttcctgcaactgttgctgtatgctatgatctccactcagcaagaggctggtatcgttaacatccgcttcaatttcatgaaaaccattgcttttcagccagtcaggctggatcatcttcatcagccagggcacgtcacgttgcgcccataaaagctgcccgttctcatcataaattagcgtcatggtggggctttgcttgtcgatattttcgggtaactcgacatgcaacttattgttttcccacttcgcaagggtatagaacagattgctctcgccacgtaacagccgaaacgtagttttatcgaaactgacgctataaccgatcagcgcgaccattccgtaggcaaggctaagcaccagtactaccgctgccgttgccaacagaaaacgtacccgcaggctgagcgggaaaaaaagacgcagtaattttttcatcagcgcaattcgaacagatagccctggccgcgaacggtggtaatcacttcttggggatattgtgcctgaatttttttgcgcagacgtcccatcagtacatcaatggtatggctttcccgcagctccgcatccggatagagttggagcattaagctatctttgctgaccactttgccattattgcgtatcaacgtttccataatagtgtattcgaacgcggtcagtttgatcacttcgtcattaatagataattcacggcgagagagatcaacctgaaacggggggaggctaatgacctgactagccagaccgctattacgccgcattaatgcctgcattcgcgccatcacctcttcaatatgaaacggtttagtcacataatcatcagcaccggcacttaatacttcgactttgtcctgccagctttcacgggcggttaataccagaatcggcagactaacatcgttgctacgccagcggcgaatcagactcagaccgtcctcgtctggcaatccgagatcgacaatcgcaatatccggtatatgttcattgagataataatcggcttctttggcatcttctgcgtcatcgacctgatgaccagcatcctgaatctgaactttaaggtggtgacgtaacaacgcattgtcttcaacaaccagtacgcgcatttttatttctccctgtcttaattattaaaatagtgtaacgcgattatgtggttatgggggtaaacattaaataaaccagcggggaggggaggtaaagtgaaaaaataaaaagcggataatcttaataagcaggccggacagcatcgccatccggcactgatacgaggtttatttcagctcatcaaccatcgtgatagctcgaccaatatagttagccggcgtcatcgctttcaggcgggctttctcttcttctggcaacgccagaccatcgataaactgcttcatgccttcggcgtcaacgcgcttaccgcgagtcagctctttcagcttctcgtacggtttttcgatgccatagcgacgcataactgtctggattggttcagccagcactttccagttgtgatccagttcatccagcagatggtcacggttcacttccagtttgctcacgcctttcagggtggattgatatgcaatcaaggcataaccgatacccacgccgaggttacgcagcacggtagagtcggtcaggtcacgctgccagcgggaaaccggcagtttgcttgccagatgctgcaataccgcgttggaaaggcccagattcccttcggagttttcgaagtcgatcgggttaactttatgcggcatggtggaagaaccaatctcaccagcaatggttttctgtttgaagtggttaagggcgatataaccccagacgtcacggtcaaagtcgatcagaatagtgttgaagcgcgcaacgcaatcaaacagttcggcaatgtagtcgtgcggttcgatctgggtggtgtacgggttccactgaatacccaggctggtgacgaactcttcgctgaactgatgccagtcaacttccgggtaagcggcgatgtgggcgttatagttaccgaccgcgccgttgattttgccgaggatctccacctggttaagctggcggtactggcgctccatacggtaggcgacgtttgccatctctttaccgatggtactcggcgtggctggctgaccgtgggtacgagacagcagcgggatatcgcgatactgaacggcgagatctttaatgccatcaatcagttgacgccagtatggcaggatcacttcatcacgcgcggttttcagcattaatgcgtgggagaggttattgatatcttcgctagtacaggcaaagtggatgaattcagaaaccgcgtgcagttccgggatctccgccactttttctttcaggaaatactcaaccgctttaacgtcgtggttagtggtacgctcgatagttttgatgcgcgccgcatcttcttcgctgaaactggcgacgattgcatcaaggtaaccgattgcgtcggcagcaaaagcaggaacttccttgatcgctgcgtgcgcggccagtttttgcagccaacgtacttcaacttgtacacggaatttcagcaaaccatattcgctgaaaatcccgcgcagcgcgctgactttatcgccgtagcgtccatcgacaggggaaacggcggtcagactggataattccatagatcacaactccggggttaaatgagcaagaatttgttttgcctgagtggtcaggcgattacgagaaaacatcagttgcagacgtccgccgccgacctggtgccagagcacggcggcgcgaatgcctgccagcagggttgcgcgaactttcgcctgcacttgtgggctttgcagtacagcaggggaaccggtgacctgaatgcgcgggccaagcgggctaatcacatcaacatagatagcagccatcgcgctcatcagcgtttcggactgtaaatcgaagtgttcgagctggcgttgcaggccgttgatccggttgcccagagtgtcgagcgcgcctttcgcactggagagtttgcgctcaagcaccatcaagctgagtgtgtagcgggttaattcggcgtttaagccctggcgactgctggcattgagcacgccgagcagggtttccagcccgacgcgcaggttggcttcgctaccgccaaaaaccgccagcgtgctgctggggttcatatcaataatactgttgagactgacgtgtagcgcatcggcatcacaatgcccctggtgagcgagttgttgcaccaggcgtgcgctctgacaaataccggccagggcgagggtgatgtcatagtaattctttgccacgttcactgcttccttgttttaagtaaagataataatcagaccggcagcggcagacgctgctcaataataccgccaccgaggcacacttcaccgttatagaagacggcagactggcccggcgtcacggcggcaaccggttcatcgaaaatcacttcaatgcgatcatcgtccagcgccttgacggtgcaagggatatcggtctggcgatagcgggtttttaccgtgcaacgcatagtgccggtgaatggttcgcgatcgacccagtgcaactgctgggcaatcaacccgacagacatcagccgcgggtgttcatggccctgagcgacaaccagaatgttgttttcgacgtctttgtccaccacataccacggttcttcggtaccttctttggtgccaccgatacccagacctttacgctgaccgagagtgtgatacatcagcccctggtgctcaccaatttcatcgccatcgacggtaatgattttgcccggttgcgccgggagataacggcccaggaactcgcggaatttacgttcgccaatgaagcaaatgccggtagagtcttttttcttcgcggtgaccagaccaagatcttcagcaatcttacgcacctgcggtttttccagttcgccgaccgggaacaggctttgcgcaatctgctcatggctgagcgtataaaggaagtagctctggtctttattgctgtccagaccacgcagcaggcggctcttgccatcgacatcggcccgacgtacgtaatgaccggtagcgatataatcggcacctaaatcttcggcggcaaattcgaggaaggctttaaatttgatctctttgttgcacagaatatccggattcggcgtgcgaccggctttatattcggcaaggaacagttcgaagacgttgtcccagtactcggcagcaaagttaacggtgtgcagttcaatgccgagcttgtcgcagacagcctgggcatcagccagatccgctgccgctgtgcaatattcctcaccgtcgtcttcttcccagttcttcataaacaggccttcgacctgatatccctgttgttgcaacagccaggcagaaacggaggaatcgacaccgccggacatgccgacgattactttttttgcggtttcagacattggatcactcacgacattgaacttcaaggcggcgtattctatcacgcagccttttagatgacaccctttgtaaaaggccagttaaaatcgccaatcatctccagcggataacgttgcccgctttgataacaacgaatactttccgccaccagcgggctacgaagattactcgcctgtaaaatttcttcggcgctgacccaacggcagcagtcgatatcgctgtcatgaggctgggtcgggcatatttgctcaagctcaatggcaaagaggaaacgcaaaaacggcgttttatctggcgcaatccactgatgcatacgaataaagtgttgcggctgcgcgctgatgccggtttcttcccacagttcacgggcggcggcttccactaaggtttcatcggcttccagatgcccggcaggttggttccataacgctttaccattaatcgtctcttcaacgactaaaaatttgccttctgcgtgcaccacgcaagcaacggtaacgtgcggtttaaacattttgcatccttaatctgtcacttctcgccattcaccattggcaagattatccaaagagtaatcacccatcgcatagcgaatcagtcgcagcgtggggaagccaacatgggcggtcatgcggcgcacctggcgattacgtccttcatataaggtgatcttcagccagctggtgggaatacttttgcgttcacgaattggtggattccgcggccataaccacgcgggttcgtcaaccagctccgcgccggcgggcagggtagggccatcatttaaggttacgccattgcgcaaggcttcaagtgcgtcttgtgtgggaataccttccacctgcacataatagatttttccggtgcgtttacccggctgggttaaacgcgcctgcaacgcgccgttattggtcagcaccagcaacccttcgctatcgcggtcaaggcgacctgctgcataaacaccctgaaccgggatgaattcttttaatgttttgcgtccggcttcatcggtgaactgcggaagaacatcgtagggtttattgaacaggatcacacgcgtgggctggttttcaggtttacgcctggtagaacgttggctgctgaatcgcttaacctggtgatttctaaaagaagttttttgcatggtattttcagagattatgaattgccgcattatagcctaataacgcgcatctttcatgacggcaaacaatagggtagtattgacaagccaattacaaatcattaacaaaaaattgctctaaagcatccgtatcgcaggacgcaaacgcatatgcaacgtggtggcagacgagcaaaccagtagcgctcgaaggagaggtgaatggaaagtaaagtagttgttccggcacaaggcaagaagatcaccctgcaaaacggcaaactcaacgttcctgaaaatccgattatcccttacattgaaggtgatggaatcggtgtagatgtaaccccagccatgctgaaagtggtcgacgctgcagtcgagaaagcctataaaggcgagcgtaaaatctcctggatggaaatttacaccggtgaaaaatccacacaggtttatggtcaggacgtctggctgcctgctgaaactcttgatctgattcgtgaatatcgcgttgccattaaaggtccgctgaccactccggttggtggcggtattcgctctctgaacgttgccctgcgccaggaactggatctctacatctgcctgcgtccggtacgttactatcagggcactccaagcccggttaaacaccctgaactgaccgatatggttatcttccgtgaaaacagcgaagacatttatgcgggtatcgaatggaaagcagactctgccgacgccgagaaagtgattaaattcctgcgtgaagagatgggggtgaagaaaattcgcttcccggaacattgtggtatcggtattaagccgtgtagcgaagaaggcaccaaacgtctggttcgtgcagcgatcgaatacgcaattgctaacgatcgtgactctgtgactctggtgcacaaaggcaacatcatgaagttcaccgaaggagcgtttaaagactggggctaccagctggcgcgtgaagagtttggcggtgaactgatcgacggtggcccgtggctgaaagttaaaaacccgaacactggcaaagagatcgtcattaaagacgtgattgctgatgcattcctgcaacagatcctgctgcgtccggctgaatatgatgttatcgcctgtatgaacctgaacggtgactacatttctgacgccctggcagcgcaggttggcggtatcggtatcgcccctggtgcaaacatcggtgacgaatgcgccctgtttgaagccacccacggtactgcgccgaaatatgccggtcaggacaaagtaaatcctggctctattattctctccgctgagatgatgctgcgccacatgggttggaccgaagcggctgacttaattgttaaaggtatggaaggcgcaatcaacgcgaaaaccgtaacctatgacttcgagcgtctgatggatggcgctaaactgctgaaatgtagtgagtttggtgacgcgatcatcgaaaacatgtaatgccgtagtttgttaaatttattaacgggagcgtaacgctcccgttgttttttgttaggctgctaacggttatcaaaattttatcaaaaaaagttatcaaaacccctcggtagttttggggtaggctggccggtcaggtggtagttctactactagtctcccacatagatattccttagctttttattattgctggcggacgctcgttaatatttaaggtcttcattgattaagacatccccaaagttagttatgtattcactgttattaggacaattatgaattaccactccttacacccgctcaaatattgttaaattgccggttttgtatcaactactcacccgggactcgccaggggacagccaacaggcattgggtgcaatcaccttagcgttcaggtacatgcggaatgtaaaaaaggccgcgagcgcggccccttcacatacatctttagtactgagactgtttaacctagggaattattatcgtattatattgcattacaactcccaacagtgacatatgaacttcctgctttactccacgactttaatatttcaaggccatgtgaagaacatatttcttgcactgcgagttcatcgagtaatccatagtaagaaacactttttgaatttttgtaaatgtatccgtaaagatgttttcttcctgtttcgtattttttgaagtatgagcttttatattgatttacaataagagtctcacctcctgattttagtaatctcttgatgctaagaactatcagataattcaaagcgtggctgtgatgataggaattatgttttttacgtgaatgagaataatcttaaatgaggaataactcattgattgacaatatttttattcaagaagtgtcattgactgttaacgcaatgttgtaaaggtaagataatctgatttatcaatattattgtgtgatttttatgtgagcagaagatattcatcagcaacgattacattagtcattttattttgccgacggcctcattgtcgaaagataagcgtacgacagtattatcagaaaagagtgattttttatccaactacacttcagcgcactgcgtgtaaaaaatgcctctttcttatgcgggatatcatcatttcatcatgatgtctttggtgagcggtgaacacaatgcacctgcgctgtctcttcaggatgaatcccctggtctggtgcctgcgggctgatgttgcagcagagcttaggagtcttagacgctactatcatttatccaatggcatggaaagcaaaagtgtcgatacccgcagtatatatcgtgaactgggtgcaacgctgagttacaacatgcgcctggggaacggtatggaaatgaaccctggctgaaggcggctgtgcgcaaagaatttgtcgatgataaccgggtgaaggtgaataatgacggtaatttcgtcaatgatttgagcggcagacgtggaatataccaggcagctattaaagccagtttcagcagtacgtttagcggacatctcggggtggggtatagccatggtgccggtgtggaatccccgtggaacgcggtggctggtgtgaactggagcttctgaccatcaacgattaaactgcgcttcggcgcagttttcgtttacaggatgttgaaagggaaaattctggggcaaaaaaagcccgccagttacggcgggaaacctcatcctatgggagaacaatgaataatgaaattgcggggttatcatctcccagtatatccatactaacaataaggttatttactcaaccaggcataaacattttgttttgtgcgtgggaacagccttaaggtgtaaagggggaggtggaaatagcaatgaggagtatcagcaagaatactcgccgctttaccacaacgtggatgagagggatgaaaaactcaaggcagagataactctgccttgaagataaatgcgcttttacagcgggcttatttcagctcttctgcttccggtaaggtcacgttcagctcaagaatagaaatatcgccatctttttgctcaagctgtacggttaccatctcaggatcaatttgtacgtatttacaaatgacctcaagaatatctttacgcaactgcggcagataatgcggttctgcatcgctgcgacggcgttcagcaacaataatctgcagccgttcttttgcaatgttggctgtgtttttcttccggctgagaaagaaatcgagtaatgccataacttatcctccgaacaagcgtttgaggaagcctttcttctcttcttcaatgaagcggaaaggacgttcttctcccaacagacgttctacggtatctgcgtaggctttacccgcatcggcgttaatgtcgagaatgaccggttcaccctggttagaggcgcgcaatacactttgatcctctgggatcacgccgacgagtttgatgcgcaggatctccagcacatcttccatgctcagcatgtcacctctgcttacgcggcctgggttatagcgcgttaacagcaggtgctctttaataggctcttcgccattttctgcgcggcgacttttgctcgccagaatgcctaaaatacggtcagagtcgcgtacactggagacttccgggttggtggtaataatggcttcgtctgcaaaatagagtgccattaacgcaccggtttcaatccctgccggggagtcacaaacgataaattcaaaatccatcgctttcagatcatcaagaactttggcgaccccttcacgggtgagggcatctttatcgcgtgtttggcttgccggcagaatatagagattttcagtacgcttatctttaattaacgcctgatttagcgttgcatcgccctgaatgacgttgacgaaatcgtaaacgacccggcgttcacaacccataatcaggtcgagattacgcaggccgatatcaaaatctatcacgacagttttctttcccttctgggccaaaccagtggcgatggccgcgctggaggttgtcttaccaacaccccctttgccgctagtaacaacaataatgcgtgccatagaaattccttgttaaaaagggatcaatttaacggttgaacggtcaaagcgttttcgactaactgcagtcgcgccgctttgccataaaattctgctgggatttgatcactcagccagtattcacctgcgatggacaccagttccgccatcaggttcgtacaaaatatttgcgtttcccggtcaccacttgcccctgccagcgcacgaccgcgcatcatgccatagacatgaatgttcccatcggcaatcaattcggccccagcgctaacgtggcttgtaacaatcagatcacattgtggagcataaatacgctgaccggaacgcaccggggtatctattaaacgcgtttttgtgaccggcgttgtattttgcgctggagcctgcggtgtgggagctggacgtggcgctttttcctttccttccgtcaggataggcagccccatcttttcaatttcggctttaagttgcgcatctttgcagccacttacgccaataacccgcaaaccggttgcgctaaccgccttatgcatcgcactccagtttaccgggtcttccagtgcactgacgttgagtacaacgggggcatgttttaaaaatgcgggggcctgagcgattttgtcttccagcgcctgatggataaccttaggttctgcctcatgcagatgaaccacagataaagtgaagctactgcctttaagctcgattggcgtgttactcatcctggccttactcaattagctattaatcatcgccagcgcgcgatgatgttccgaagactataaggcatgttatagtctggattatattgaggcaagtcaccctcccatttattcagagtaaaagtctattctgtgataaatggcgctgattcatagcttaaaaaatacccttgtcaatcaacccattgccgtcgtacttttgattgttcttatttacgcttcctttttccgcaccctaatcgtgacagcatctccagacctgtttaaatatccagtattgaggcaagtgtattttttcaccacgccaggctttcttaactttccattttttgcggcatcattaaagaacagatacccgttatcttaatatccgccacagaattgctctatcatagaaaccgcagaagacgtctgatacttctgtcaggtcatcgtaactcgtccaggtcagcggttttgattacggattgatgatgaaatgagcataagtgttgtacggttggattatcaggatgtgctatgaatatgatgcgtattttttatatcggattgagtggtgtggggatgatgttcagtagtatggcgtctggaaatgacgctggcggacttcaatctccggcgtgcggcgttgtttgcgacccgtatatttgtgtgaacagtgatggcatttccccagagttaacaaggaaatatctcggcgaaaaagccgctgaaaacttacaaagtttacaaggctacgatcccagcgaatttacattcgctaacggtgtattttgcgatgttaaagaaaaattatgtcgtgatgatcgttattttggtgtggatggtaagcggagtggaaaaatcaatcaaaccaccacaaagatgttatttatgtgtcgtgagtgatgtcttgtttacattatgttctattcgtcattaacctcttgagcgacagagaggagtggggcattaacgtttatgacggggagagtccccgtcggttgacatttacttaatttgaatatcgacgttatattttttagttttgtttttacgggcgtcgtttcgggtttgcaacactcgcagctcatatttgccagaagcagggagactgtattgtccgtgactatcgagttctggggaatatctggataaatcaacactatcatcgattcctggcccgaagaggtaagtatcagcgccttcattagagatactcacatgcactttctgaccttttttggcatagaaggtatatgtatcgtaatcgtatccctttatttcgccggagtactgagcgctgctatggccttttctgaactcaacattgacattcttacccgcagcaaagctcgtggaggttagcagtgcaagcagcaatacagccttcctgatgctcttgattttcattggtagtctcctgttcagaatgagtacgatgaactgttataatataacaatccctaacgggagaattccagtggctttcctgcgttcggtaaaatcacgttgcggcatttttgccggggggattacttataaagggggcatggactcaacaaaccgtagaaatctacagctggctggcttgtggcgcgggtttcattgatgttagcttatgccaaaacctggcatcttaaagagtaaaagtatgttttgtgtgatttatcgaagcagcaagcgtgaccagacctatttatatgtcgaaaaaaaagacgattttagccgtgttcctgaggaactgatgaaaggttttggtcagcctcagttagcgatgattctgccgctggatgggcggaagaaactggtcaatgccgatattgaaaaggttaaacaggcattaaccgagcaaggttactatttgcagttaccgccaccacccgaagatttgctgaagcaacatctttccgtcatggggcagaaaacagacgacactaacaaataaccgatatccggcggtggcattatctttgtcggcgcgggttttcatatccacgataaggtgaggggaacgttatgtatcaacatcacaactggcaaggtgcgctgctggattatccggtgagtaaagtagtctgtgttggcagtaactatgccaaacatattaaagagatgggcagcgcagtgcccgaagagccagtgctgtttattaaaccagaaacggcactgtgcgatctgcggcagccattggcgatcccatccgatttcggtagtgttcatcatgaagtcgaactggcggtgttgattggcgcgacactgcgtcaggctacggaagagcatgtccgcaaagccattgccggttatggcgtggcgctcgatctgacattgcgtgatgttcagggaaaaatgaagaaagccgggcagccgtgggaaaaggctaaagcgtttgataactcttgtccgctttccgggtttattcccgcggcggaatttaccggcgacccgcaaaatacaacgctgagcctgagcgtaaacggcgaacaacgccagcaaggtacgactgcggacatgatccataaaatcgttccgctgatcgcttatatgagcaagttttttaccctcaaggccggtgacgttgtgttgacaggcacgcctgatggcgtcggcccgttgcaaagcggtgatgagctgacagtcactttcgatgggcattctttgacaactcgcgttttgtaatactttttgccgcctgaaagcggcggcaaaacttgcatcgctgtgccagactggttataaggtgcgttttaacgtaatggcggaacacctgatgagcgatgtacctttctggcaaagtaaaaccctggacgaaatgagcgatgcggaatgggagagcttgtgtgatggttgcggtcagtgttgcctgcataaactgatggatgaagacaccgacgaaatctacttcactaacgtcgcctgtcgccagctcaatattaaaacctgtcaatgtcggaactacgaacgtcgtttcgagtttgaacccgactgcattaaattaacccgtgaaaatctgccaacattcgaatggctgccaatgacctgcgcttatcgtttgctggcggaaggtaaagatttacctgcgtggcatccgctacttactggtagcaaagcggcaatgcatggtgaacgtatctctgtgcgtcatatcgcagtgaaagaaagtgaagtgattgactggcaggatcatatcttaaataaacctgactgggcgcagtgataaatttaatagatgctgatgggggctttcttaatatacgtctggatgctcgccatttcgtagccctgtttttgaaagcgctctgtcataatgagagttacccgataccttattatcaacaggtaactctcaatctttaaaaaacgtctgtgtttttaaatgtgataaaccttataccttgagtacatggagagaataatcgcttatcagacttcaggtacctcaaagagtgtctttttaccgtgtcttttctgatactcattacaggtgttaatcatttttttggccgcttcttttagcaaagaaagcattaaatcatcataatcaacgtagaatctggttgtttcagtttccgtttttatctcaccgatggcggctatttcggtggttaatttcaatttggcggcatcgatatctttattcgcttgtttaaccgtgttagacagggtggtaaagaaattctgcacagattttaacttgttcttcaattctggaatcagttttccttcaactacgcccgcagcaatagaataggaaatgattaatccaaatggaccggcgacgacaccggctgcggcaccggcatatgcttccttcctgattttatctacctgactctggaaatagctgcttttttcactaaaatcattggttaactggctatctaacgccagcagtttcccggaagcgttgttgaaactttgactgcttaccagcagggatttttgcgcttcattcagcttcgtgatgccgtcatccagtaccttaatgagaatgtctttctgggcggatgctttcttctcattgtactcatcaaatagcaaaatatacgctgcgagcaattgcgtcgcaacaccacaccattcatacactgtttgggttgcttcaaaatacttatcctggctatccataagtaaggttttaatatcgccgactaaaacggaggctgcctgactatactcctgtttaaagcgacttaactcttttatggtttcatcaaaggtctgccaggggatgacctgatcgagatatttattataaagatctaatgctccatctgcggtttcgattgcgtttttaactacttctaccgttttatctgcaacgatttcagtcataatcattcgcctctttaaatatataaattgtaatgaaactcctgttttacaactattaataaattttacttcatctaattcatagttagccgggcgggatgcgtcaatgtctttatttctattaatatgataaatatcaaacaatgtttaatgtcattatggcgaatgcttctattctattttttagccgggtgatatttttcatttctgctggatgagcgtcgtcgccagaaggccacgtgagcacaagataagagaacgaaaaatcagcagcctatgcagcgacaaatattgatagcctgaatcagtattgatctgctggcaagaacagactactgtatataaaaacagtataacttcaggcagattattatgttgtttatcaagcctgcggatctccgcgaaattgtgacttttccgctatttagcgatcttgttcagtgtggctttcctagtccggcagcagattacgttgaacagcgcatcgatctgaatcaactgttgatccagcatcccagcgcgacttacttcgtcaaagcaagtggtgattctatgattgatggtggaattagtgacggtgatttactgattgtcgatagcgctattaccgccagccatggtgatattgtcatcgctgctgttgacggcgagtttacggtgaaaaaattgcaactacgcccgacggtacagcttattcccatgaacagcgcgtacagccccattaccatcagtagtgaagatacgctggatgtctttggtgtggtgatccacgtcgttaaggcgatgcgctgatgtttgccctctgtgatgtaaacgcgttttatgccagctgtgagacggtgtttcgccctgatttatggggtaaaccggtggttgtgctaagcaataatgacggttgcgttatcgcccgaaacgctgaggcaaaggcgcttggcgttaaaatgggcgatccctggttcaaacaaaaagatctgtttcgtcgctgtggcgtggtttgctttagcagcaattatgagctttacgcagacatgagcaatcgggtgatgagcacgctggaagagctaagcccccgcgtcgagatttacagtattgatgaggcattctgcgatctgacaggtgtgcgtaattgtcgcgatctgactgattttggcagagaaattcgcgcaacggtgctacaacgtacccatcttactgttggtgtggggatcgcccagaccaaaacgctggctaagcttgccaatcatgcggcaaaaaaatggcagcggcagacgggtggggtggtggatttaagtaatctggaacgccagcgtaaattaatgtctgctctccccgtggatgacgtctgggggattggacggcggatcagcaaaaaactggacgcgatggggatcaaaaccgttctcgatttggcggatacagatatccggtttatccgtaaacattttaatgtcgtgctcgaaagaacggtgcgtgaactgcgcggcgaaccctgtttgcaactggaagagtttgcaccgacgaagcaggaaattatctgttcccgcagctttggtgaacgcatcacggattatccgagcatgcggcaggccatttgtagttacgctgcccgggcggcggaaaaacttcgcagcgagcatcaatattgtcggtttatctccacgtttattaagacgagtccatttgcgctcaatgaaccttattacggcaatagcgcgagcgtaaaactgctgacgcccactcaggacagcagggatatcattaacgctgctacgcgatctctggatgccatctggcaagcgggccatcgttaccaaaaagcgggcgtgatgctgggggatttcttcagtcagggagtcgcgcagctcaatttattcgatgacaacgcaccgcgccccgggagtgagcaattgatgacggtaatggatacactgaatgctaaagagggcagaggaacactctattttgccgggcaggggatccagcaacaatggcagatgaagcgagccatgcttagtccacgttatacaacgcgaagttctgatttactgagggtcaaataaatatagcggcaggaaaaaagcgctcccgcaggagcgccgaatggattagcgaccgaacagatcacgttttttcgctttaaacggctgggaaatcaccaccagcactgcgacaatcaggtaagcgataaaaataccgagcagccactgcggcatttccagacctaaaaaatcccactgacgctcggcgcaatcgccagaggcgacaaacacttgcggcacccacttatccagcggcagccattccgggaaacgaaccataaaatcacaggtggcaaacgggctaggatagagctgaagcatggtgtgctcgtaagttaactgcacaccgcggaacgcactatacaaccagataaccatcgctacataacgcagcggagttttcggggcgatcgcgccaatcagcgcagcacccagaacgccgaataacgcgcagcgttcataaatacagagcacgcaaggtttcagtaacatcacatgctggaaccacagcgccgtcagttccagtgccagagcagtaaacgccatcaacagccacgcgccccggccttgactacattggttcaaaaatcgcaacataatcatttccctgcaatatgcatagagtgcgcagtttaaaccaattcattcgctgcgccaccaggaggcagcaaaaataggacgcaattggacaattatcgggcgaaaaggcaaaccgggcatttgtatgcccggtaagttgttatcaaagcgttgctatccagcccatttgcataaaccattcggttacaggggcaagcgtaaactcgacgcagagcaagccgacgagtgtcaggacgagggtgtaaggcagggccatccacaccatgcggccataagagaggcgaatcaatggcgcgagtgcagaggtcagcaggaacaggaacgcagcctgaccgttcggcgtagcgacggagggcagattggtaccggtattaatggcgaccgccagcagctcgtattgcttcaacgtgatagcgccactttccattgccgctttcgcttcgttgatataaatcgtccccacgaagacgttatcgctaatggaactcagcagaccgttgaaaatatagaacaggctcagctgagcatgttcgcttgcctgcaacacaaactgaataattgggctaaacagttgttggtcgataatcaccgcgactacgctgaaaaacaccgtcaacagtgcggtgaatggcagagattcggtgaaggctttaccgatagcatgctcatcggtgacaccggtcaaacttgttgccagaataatgacactcaaaccaatcaagccaacttccgccagatgcaacgccagcgcagtcaccagccagacgccaataatcgcctggacaatcagacggattttatcctgacgggtacgctggtggcggctttgatcgtcaaactgttgcaacacttcgcggactttctccggcagcgtttcaccgtagccaaaccaacgcagcttctctaccagcaggcaggttaacaggccacaaatcagaaccggaacggtcaccgggctcatgcgcaggaagaaatcgccaaaatgccagccagccgctttagcgatgatcaggttctgtggttcgcccaccatggtcattacgccgcctaatgcggtgccgacaccggcatgcatcatcaggctacgcagaaagccacggaactgttccagaaccactttgtaatgcttgtcgatatgactatcgtcttgcaggtcggtgtcttcggtacgggaagaggctacgcggtgataaataccataaaaaccgactgcaacgctgatcaccaccgccacgacggttaaggcatcgaggaacgcggagaggaacgcagccgccacgcaaaaagagaggctcagcagcattttggagcgaatgcttaacagcaaacgggtaaatatgaacagcaacagctgtttcataaaatagatacccgccaccataaacatcagtaacagcaagacttcaagatttgccgccacctcttcacggacgtgttccgcgctggtcatgccgatgaataccgcttcgatagccaacagaccaccggggagcagcgggtagcatttcagggccatcgccagagtgaaaataaattccgctaccagcaaccagcccgcgacgaaagggctgatgaggaaaattaacgggtttacgattaagaaaatgatgagggcgagtttgtaccagtcgggggactggcccaaaaaattgcgccatagcgcgcggccccaggagatctccatgatggtttcccttaccttacaaataatcaatgatgtttttatgtttaaacgcaaagcttaacggtcaggcaggagtgaggcaagtcttgatagtcaaggggaaagagatgcggaaaatgaagccttgatccctttttcttctttttgtctgctatcagcgtagttagccctctggtatgatgagtccaactttgttttgctgtgttatggaaatctcactatggtcattaaggcgcaaagcccggcgggtttcgcggaagagtacattattgaaagtatctggaataaccgcttccctcccgggactattttgcccgcagaacgtgaacttagtgaattaattggcgtaacgcgtactacgttacgtgaagtgttacagcgtctggcacgagatggctggttgaccattcaacatggtaagccgacgaaggtgaataatttctgggaaacttccggtttaaatatccttgaaacactggcgcgactggatcacgaaagtgtgccgcagcttattgataatttgctgagcgtgcgtaccaatatttccactatttttattcgcaccgcgtttcgtcagcatcccgataaagcgcaggaagtgctggctaccgctaatgaagtggccgatcacgccgatgcctttgccgagctggattacaacatattccgcggcctggcgtttgcttccggcaacccgatttacggtctgattcttaacgggatgaaagggctgtatacgcgtattggtcgtcactatttcgccaatccggaagcgcgcagtctggcgctgggcttctaccacaaactgagcgcgttgtgcagtgaaggcgcgcacgatcaggtgtacgaaacagtgcgtcgctatgggcatgagagtggcgagatttggcaccggatgcagaaaaatctgccgggtgatttagccattcaggggcgataatcccttccgtttaaagagcaaacccctcaaacgaggggttttttgttgtttttacagatttcccattcttggcgggcaacgttccagcaactcgatgctgccgtcttcgttttgctgttcgagcatcacatcaaatccccacaggcgatgcacatgcttcaggacttctttgcgcccccgatccagcggtgcgcgattatgtggaatataacgcagcgtcaggctacggtcgccgcgcaaatccacgttccagatctgaatattcggctccagattacttaagttatattggctgcttaaccggttacggatctcccgataaccttcttcattatgaatagcggaaatctccagataattatgccgatcgtcatccagcacggtgaagaagcggaaatcacgcatcactttcggactcaggaactggctgataaaactctcatctttgaaatcacgcatcgcgaaatgcagcgtttccagccagtcggaaccggcgatatccgggaaccagtatttgtcttcttccgttgggctctgacaaatccgtttaatatcctggaacatggcgaacccgagggcatacgggttgatgccgctgtaccacgggctgttataggggggctggaagaccacattggtgtggctgtgcaaaaactccagcataaaacgttccgttactttcccttcatcatacagatggttaaggatggtgtagtgccagaaggtcgcccagccttcgttcatcacctgagtctgtttttgcggataaaaatactggctcaccttacgcacaatacgcaggatttcacgctgccaactttccagcagtggcgcatttttctccataaaatagagcaggttttcttgtggttcggacggatagcggcgcgcttcagcaaccgttttctcttcctcgcgcttcggcagggtacgccagagcatattgacctgactttgcagatactcttcgcgacttttctgccgggctttctcttcttgcaggctgattttttgcgggcgtttgtaccggtccacgccgtagttcatcagcgcgtggcagctgtccagaagccgttctacttcatcaacgccataacgctcttcgcactcggtaatatatttacgggcaaaaatcagataatcgacaatgctactggcgtcggtccagctacggaataagtaattgtttttgaagaaagagttatgcccatagcaggcatgagccatcaccagcgcttgcatggtaatggtgttctcttccatcaggtaagcgatacacgggttagagttaatgacgatttcataggccagtccttgctgaccgtgcttatacagccgttcagtctcgataaactttttaccgaaactccagtgcggatagttaattggcatgccgacgctggagtaggcatccatcatctgttcactggttatcacttcaatctggtgcgggtaggtatccagccggtagagtttcgccacccggtctatctctgccagataaacatccagcaggtcgaacgtccagtcgggtccatcgctcaaacgtgtggtgtccttattcatagaatcgatcgtcgccatacgcgcacctcattgttgtcggcgctctctgtgtggagcacctcatttcaagcatagaacacctgttaaaaaccgcgtcgccggagaatttttttctttgcgatttcttattatcagagtgccactaatccgcttctgaacggaattttatgctggataaaaagggcgttcagcaggagatactaaagacgccatattgccgcagagtcagggagatgtgagccagctcaccataaaaaagccgcatgttgaataatattttcaactgagttatcaagatgtgattagattattattcttttactgtatctaccgttatcggagtggctatgcgagttgtcatactgggaagtggtgtggtaggcgttgccagcgcctggtacttaaatcaggcaggacatgaggtcaccgtcattgatcgggagccgggggccgccctggaaaccagtgccgcgaatgccgggcaaatctcccccggatatgctgcaccgtgggcggcaccaggtgtgcctttaaaagcgattaaatggatgttccagcgccatgcgccgctggcggttcgtctcgacggtacgcagttccagttgaaatggatgtggcaaatgttacgtaactgcgacaccagccactacatggaaaacaaagggcggatggtgcgtctggcggaatacagccgtgattgcctgaaagcattgcgcgccgaaaccaatattcagtatgaagggcgtcagggtgggacgctgcaactgttccgtaccgaacaacagtatgaaaatgcgacccgcgatatcgccgtgctggaagatgccggcgtaccgtatcagctgctggaatccagccgcctggcggaagtggagcccgcgctggcagaagtggcgcacaaactgacgggcggcctgcagttacccaatgatgaaaccggagactgtcagctatttacccagaatctggcgcggatggcggagcaggcgggggttaaattccgctttaatacgcccgttgaccaactgctttgcgacggcgagcaaatctacggcgtgaagtgtggcgatgaagtgattaaggccgatgcgtatgtgatggcgtttggttcttacagcacggcgatgctcaaaggcattgttgatattccggtgtatccgctgaaaggctacagcctgaccattccaattgcgcaggaagatggtgcgccggtatccaccattcttgatgaaacctacaaaatcgccattacccgtttcgataaccgcattcgtgttggcggaatggcggagattgttggttttaataccgagctgttgcaaccgcgtcgtgaaacgctggagatggtggttcgcgatctctatccacgcggcggtcatgtcgagcaggcgactttctggactggtctgcgcccgatgacgccagacggcacgccggttgtcgggcgtacacgctttaaaaatctgtggctgaataccggtcacggcacgctcggctggacgatggcttgcggttccggtcagttgttaagcgatctgctctctggtcgcacgccagcgatcccatatgaggatctaagcgtagcgcgctacagccgtggatttacgccaagtcgtccgggccatttacatggcgcacacagctaaggaaacgagatgacccgtccgatacaggccagcctcgatctgcaggcattaaaacagaatctgtccattgtccgccaggccgcgacgcacgcgcgcgtctggagcgtggtaaaagcgaacgcttacgggcatggtattgagcgtatctggagcgcgatcggggccaccgatggctttgcattgcttaacctggaagaggcaataacgttacgtgagcgcggctggaaaggaccgatcctgatgctggaaggatttttccatgctcaggatctggagatttatgaccagcaccgcctgaccacctgcgtacacagcaactggcagctcaaagcactgcaaaatgcgcggctaaaagcaccgttggatatttatcttaaagtgaacagtgggatgaatcggttgggcttccagcccgatcgcgtgcttaccgtctggcagcagttgcgggcaatggcgaatgttggcgaaatgaccctgatgagccattttgccgaagcggaacatcctgatggaatttccggcgcgatggcgcgtattgagcaggcggcggaggggctggagtgtcggcgtagcttgtccaatagcgcggcgactctgtggcacccggaagcgcattttgactgggttcggcctggcattattttgtatggcgctagcccgtccggtcagtggcgtgatatcgccaataccggattacgtccggtgatgacgctaagcagtgagattattggtgtccagacgctaaaagcgggcgagcgtgtgggctacggcggtcgctatactgcgcgcgatgaacagcgaatcggcattgtcgccgcagggtacgccgacggttatccgcgccacgcgcctaccggtacccctgttttagtggacggcgtgcgcaccatgacggtggggaccgtcagcatggatatgctagcggtcgatttaacgccttgcccgcaggcgggtattggtacgccggttgagctgtggggcaaggagatcaaaattgatgatgtcgccgccgctgccggaacggtgggctatgagttgatgtgcgcgctggcgctacgcgtcccggttgtgacggtgtaacttgttgtaagccggatcggaggcaacgtcttctgggtgcaaaaaaatcatccatccggctggtcagcaactgtagttgttaatgtgacagagccattgcccatgatagtgtccattaaaaggatggacactatttccccggaacctgaactcaccgcacaggcgttctacataaaacgcttacgcttcattgttgactcgaactcgacttcagataaatcacgctttacccttgatggagcctgtacatagatttgtgtaattgcctgattttgatatgttcaattcaacatcaaatgaaggttaaattatggacgacaaacaattgcaggctcaggctgcgttcagcaaagcatcgcaaccggcgatagatgcttcattaaatttaagattcagcttcctcttcagccacccgtacgccaatcttcaacacttcattatcttctttctcggccaccgtccagatcatcccggcaaactctacctggtcaccgacaaccggtgccgcgcctaacaactgctggacaatttcacccagcgtttgctgcttatcacgatattctcgcccgtcttccaggccatatatcagcgcaacatcagcatatttggcgctggcttcgagaatgaagtcaccaaagaagcgttgatccagcgcgaccggcgggctctggctgaacagtttaccgagcgccggaagatcgcgttcccgaccaattacacacaacacatcgccttcgcgcagtcgggtgctgccggtaggatgaagcaactggttatcacgaaacagtgccgcaatacgcgtctcttttggcatatgcaaatcgcgcagtgccgcgcccacgcaccatttatcggcactcaattgataaacaaactgctcccacggattttccggatgaatatccaggccaacgcgactcaccggacgtcccactggcggaaccaccactttggcttttttagccgcccagctgagacttgttccctgcaagagcagactaaccagaaccacaaagaaggcgacattaaagaacagacgtgcattctccagccccgccatcatcgggaacacggccaggatgattggcaccgcgccgcgtaatcctacccagctgataaacacgcgctcacgcagattgaaaccgcggaaggggagcaatccagcaaatacgctaaggggacgggcgaagaatatcatccatgcggacaaaatgagcgccggaatggcaataggcagcagatcgcttgggttaaccaacagccccagcaccaggaacatggcgatttgcgccagccaggcgaggccgtcgaaattttgcaggatgccgtagcggttgcgaatagggcgattacccagcagaaaaccgcacagatacaccgccagaataccgctaccttccagcgcagtagttaaactgaaaatcagaataccgccacttaatgccagcaatggatataatccggcgggcagggcgatgcggttgatcatttgcagtagtaaataaccgccgccaagacctattacaatgcccagaccaaattgttgcagaatatcgacaatgaacatccagctaatattgctctcatgatgctggatcatcgcaattagggtaatcgtcagaaagaccgccattggatcattactgccggattcaatttccagcgtgctgccaacacgttcgttaagccccttaccacccagcagagaaaagaccgctgcagcatcggtagagccgacgatagcgccgattaataagccttcaatcaaatcaagattaaacagccacgccgccatcatgccggttaaaccagaggtgataagcacgcccagcgtcgccaggctcagtgccggtcctaacgccacacgaaaggaactggcctgagtgcgcatcccgccgtcgagcaaaataatcgccagtgccaggttacttaccatgtaggcgaaggggtaattatcaaacgggataccgccgacgccatcgactcctgccagcatgccgatcgccagaaaaataaccagaataggaatgccaagacgggaagaaaaactactaagtaatatactgctggtgacaaggatggatcctaagatgaaaaggctaattattgttgtggcatccaacggtcggttactcctgattacgctgtctcttatataaaccctaccatattagcggcagagacagcgttttacttagccctgaagcgtgatttttttacattttaagaacaggatgaccgctaatcgtcaactgagtgccttcccgggtgttattcagaatggcatgtgcgcccaacggcagcgtaaccgtgcgttgttcatgaccaaaatcgaggccggtaatgagtggaatgctcaggcgggaacgcaaaaacgcgtacacactctccaggttgtaacctgcgtcataatcattgggcgtgctgccgctaaagctaccgagaataatcgccttctgacgtggcaaaattcccgcatgatagagctgcaacagcatacgttcgacccggaaagggtgctcgttaatatcttccagcaccagaataccgttctcaatttttggcatccacggtgtaccgatcagactaatcagcatcgcaagattgcctccccacaacgtgccttcggcccgacatgtcgggccttccccttgccattcaatggtgaaggtttcattgcgtaacgccagccagaaatggtgctcggtaaaggcgttcagttcatccgcgccaaagtttgctaccagcatggggccgctaaaggtgatgacattgccatgcgccagaagaccgcactgaatggcggtaaaatcgctatgtccgcaaatgagcaacgggtcatgttgttggcgagccaccagtgcctgccagtcaatatctgccagtaaacgactggcaccgtaaccgccgcgtacagccagcacgatggtgttgggggtagtcagtctggcaagggaattgagatcttccagacgctctgtttccgtacccgcaaaacgctcacaacgacgggcaataacctcgacgttattgacttgatgccccgcgtcggtaaggcgctggataccacgcagcgcggcgtgctgtttaatgcagtaaccgcttggggcaattaagtgaaacagagacatggcaattccttgctgacaacagaaacgaaatgtatatcatgccgcttaggtgtgccgttgtcacctcaacggcgattccaggctataaggatagaagaagtgaaattgagatggtttgcctttttgattgtgttattagcgggttgtagtagtaagcatgactatacgaacccgccgtggaacgcgaaagttccggtgcaacgtgcgatgcagtggatgccaataagccagaaagccggtgcagcctggggcgtcgatccacaattgatcacggcgattatcgctatcgaaagcggtggtaatccgaacgcggtgagtaaaagcaatgccattggtttgatgcagttaaaagctagtacctccggacgtgatgtttatcgccgtatgggctggagtggtgagccgacgaccagcgagctgaaaaatccagagcgtaatattagtatgggggcggcttacctgaatattctggaaaccggcccgctggcaggcattgaagatccgaaggtactgcaatatgcgctggtggtgagttacgctaacggggcaggtgcgctgctacggactttcagcagtgatcggaaaaaggcgatcagcaaaatcaacgatttggatgctgacgagttcctcgaacacgtagcgcgaaatcaccctgcgccgcaggctccgcgctatatctacaaacttgagcaggcactggacgcgatgtaaatcagtcgcgcactttgtccgctttttcccgggcttctcgctcgagagagaaaataatccgctgtaattgccgctccaccgtcgggctgacgttaagaaaacggaagctcagacggggagtggtgatggtttcattcttgccatcaatcactttgcgctcgctgatggagattaactgggcgtcaaagtgaaaaacaccccattgccccatgttgacttcaatctgagcgaagcgcatgccttcttgtaattcggcaggctttgctgtttccagtaatgcgcccatgccgcctaagctcaaatcatacaggcggaaacgtaacgtactgttatccgccagtttggtctggcaaaaataaggcggatggagtggggcggagatgcggaaatatcggcgtcgttgtacaaaccataaggtgggaggcggtacggtaataaatgccggaagctgcaagtattcactctgctgtagttgttcaacagtaaactcgactttcgcaccctgagtttcggcggtaatggtaatgtgctgtgcctttagcacggcgatgttgtcttcggcttgactgccgaaatccagcaccagtttatccggggttattgccagtaatttgctgatcagctgcccgccattccaactgagacgcaaaggaattgcggctttgtgcaaatcgcgtaacacgcccaggacggctaacggattttgtttcaggaactgctcatggtaatgactcacgcggaaaaactcctgactgacaaactgtctttggtttatcggtcacagttaacaaaacttaatacaaatgcgtgaatattttttacatgttgttcttaaatcagccgacatacgcccagcatcgatcccgcccttgcctatacttagagcgttgatgtaagcatttcttgcgtccgattcatcgaaacgagggcctgaacatgggaattattgcctggattatttttgacctgatagccggcattatcgccaagctaatcatgccggggcgtgatggtggtggatttttcctgacctgtattctcgggatagtcggtgcggtggtcggcggctggctggcgaccatgtttggcattggcggctccatcagtggttttaatctgcacagcttcctggtggcggtggtgggagctattctcgttctgggcatattccgcctcctgcgaagagaataagattttcataaggcggatagcgatacagatgccgctatccgctttcacatcagaacgtatactcgacacctgctttacgggtgaaaaaaatcaatatagcacttcgatatccgataaagtcggttcccggtaacaacaacagaatccttttttaattattgtttcgttgtttttggtgtgattcagaaaataaatattttagacagtagccagagtggcgttaaaaatggggcggatagtgaggcggttttggctgcgcttattgaacatttagaattgatcaatccttctggcagattaagccaaaatacccgtagcgcaatgcttcagttacgcgaagaggaatggtctgaattctttttttggttgctaaattctctggagtgtctggattatgtgattattaatttaactccagaaagcaaaaaaacgttgatgagtgaacaccgtaacaatattcaggtagcaattgatgctttatatagccaacgtcggcgtaaaagcccgggtgatgaaagtgaaacacttacccgtagaaatgacgctatcttcggcaaccacgtatggcaaacatttgcgcaatacttcccgccaggacttgaaaaaccgtctgtgtaaaaaaaaccatagctatggtgttatctgccgacaacgccatccggagaagccgaatgacgttgtcggagtaagcgctggttaaggtgtgggttgtgcctctttggtactgggttgcgtcgttgcactcttaacggtcggacgcgtcgccggaacattgtcacacggttgctctttcgggcagatcaaatccagcattttcagcgtcacgccattggtccagccaaagccatcctgtaatggatattcgccaccgccgccccccgttccggtggtgctgacatcatatttttccaccagctttttctcccggtcataggtgtgctgaacattggtcaggaagtgccagctaatgtccatcgccacctctttttgcccgtagttttgtaatccttctgtcgcgacccactgtaacggtgcccagccatttggcgcatcccattgttgcccacttttcacgctcgtggtgttcaggccgccgggttgcagcagatgtgttttcgtcgccgtcgccattttgttggcgcgatctttcgctgccgcattgacgtacagcgggaacagggcggccgcggttaactgattgcgcactttatgacttttcaggtcgtaatcggcataccagccttgttgatcgttccacaggtatttttcgatccctttttgacgggcatttgccagcgtttcgtactggtttgccatcgcgttatctccggcagctttgctggcgcgggcgaggattttttccattttaaacatcaggctgttcagatcgaccggtacgatgctggtggtgcgtaaggtatttaactgctgcgggttgtccatccagcggctgctgaaatcccagccagacgcagcggcagagcgcaggtcgcggtaaatttcagtggcaggtcgattcggattgcttttggcggtggcaatatcttccacccaactctctggtcgtggcgtatcgcgatcgtcccagtagcggttgagaagggtaccatcctgaagtttgacaacgcgtttttcctgttgtccggcttgcaggttttcaacaccgtccatccagtaagcatattctttttgcatttgcggcaggtattgcttcaacgcggcatcgccttcatgctgcgccagtaactctaccatcagggcaaagaagggcggttggctgcggcttaaatagtaactgcggttgccgttgggaatatgaccgtaagtgtctatttcatgagcaaaattggccaccatatccgcgactttatcccagtgaccgctttcggcaagtcctaacatggtgaagtaactgtcccagtaatatacctcgcgaaagcgtccgcccggcacgacataaggttccggcagcggtaacagagaatcccatttttcggtgttttcggtagaacgcgttaataccggccaaagtccgtcaatatgttcgcgcagactctgcccctctggcggaacatatttctcgccttctttcggcagggtgaaattgacgttaacgaaatggcgcagatcaaatccgctctggttttgctgcatccgataatcagcaaggatcatcagcggatcgctgttcggcacggcatcggcaaaggttttttggtccggaaaaagtttggcgttttgcacatcattaaacagcggccctaataaaatatcaggcggctgtggtgttaccggtgtttcttctgcctgcacgcttagcgcagcgaaacacaaaaagatacaggctggaattaacgccattttttgcgggcgagaaggtgcgggggatttcatcaatcattctcctttggcgaaaccgaataaaacggtattcaagtatcagaaaaccttagttcaggatcgcactagctgcatgatcgaaatctcattctgcgaactgtcaggcattttagaaaagggaattaaagggataaataacggcgaaatagagtgatcaaataacgtctgtttattagccagccagcggcgttgggttcgtgattagcgaagaaaaatcatcataaattggtgaaaaatataacaggtagttaaaaaccattagtgctgagtaaattgccggatgacatcagaacgatgccatccgaacagtggcttaaccctgacggttgaaacgttgcgttttaacgtccagcgttagcgtttcttctggttgtatcgcatacagtttctcaccctgctggcaaatccagccaatccccagttcacgggcgattagggcgctgtgggataccggacttccggcgctaaggcagataccttttacaaccgccggatccagttgcagtactgtggaaggataaatgttctccgccagtagaatagttgggctgttaaactgcgggagttcttctttcgtttgggtcaggtggaccagggtgcgatgcagaagatcgtccacatcaatatagcgagcttgtagatattcatcatccagttgctggtattgctggctaagttctttaagaacttgctgccaggcatattctgccgtgcaatgttcatgctgaaggagttcgcttgccgccgccagcagttccggatcatctaacagtgtatggtgaccagaaaagattgcggcaatatcgtcaagcccgctggcttctgctttcgctgttaacgtcatcagatctaataacgtgaagtcaatagcctggcgtaatcgatcttgttcttcttccacggtcagggtactttttgcctgtaccgtacataaaactggttgataataaaaggctttaccgctaacaggcggaacgggacgcagagtaggtggagcgacttcctccgtttcaccaaagttatcttcagccagctgacggaaagcgatcagtgcctcttcagcttctggccctttcgcaatcaggcgcagcgtatcgttatagcgaacttgtagtaacgcaatctggttaatactctctggtgtgacgcatttgccgtttttttccagcaacatatcggcattaaatgtgcttaaggtataaaccagccgggaggccggacgtacatgcaggccgttacggttttttatgaccaccgccagagaacgggcttcttcatcgtacgcaggacatgtgtcagagatttcagtgtcggaggacggtaaacccagttgttcacgtttggcttccagcgcatgcatggcgtcaaagataactttgtcgatatccgccccgctggccgcgctgaccgttgctgccagtgtaccttcgaccaacggcgcagcacacaaacgtacttttgcggcgatctcgggagccagcaattccagcgcagtttcagcactcaataatgcgctacccatatccatcatgaccagcacatggtcggcatcagcaacagattcgatggcctccatcactttgacggcatcggtaccaatgggattttgtggatcgtcaattcccgcggcaatggcgattttacaactatcactcattaacatctgacgggctaattcaccgacaccttctcccagtcggctgctatgactaactatgaccaggtttaccatcaccaattccttactcttttgcggctaacgccaacatttgcatcataaacatcacgctggtcgcgccgggatcctggtgaccaatactgcgttcaccgagataactggcgcggcctttgcgggcttgcatcgtaatcgtactttgtgcagcggattcggcgatgctactggcagcttcgagcgccaccggaacagagagattttgctcgctggactgacgtaagctttccaccaccggcacccacacatcacacatggttttatcgccaggttcggctttcccgcgactgattacgccgtccgcgccatcgcggaacatctgataaagctcttccagtgtcaggctttgccgtgcctgggtcgcctgtgcggcgcggataaagaaggtaccgaacagcggaccactggcaccaccgacgctggaaagcagcgtcataccggtattcttgagaatgaaaccgatatctttatctgcgatagcagggagtttttccaccactttgctaaagcctcggttcatatttagcccgtggtcagcatcgccaatttcgcgatccagtccggtaagatactcgctctcggtgctgaaaatatcgccacaacgagtgagccagttaacaatttgagttctgctcagactcattgctttctccttatttaccccagttaagggccggggtgtggaccggggcgtcccagagtgccagcgtttcgtcatcaactttcagtaaggtgatactgaaaccggtcatatccagactggtgcagtacgcgccaattaaattacgttcgatagtcaatcccgcttgctggcaacgtgtggtcaggcggttatagacgccgtacagctcagaaagcggagttgcgccaagattgttaaccagcgcaatcacccgatcgccagactggagcggttgtttggtttgttgttcttcctgccaactgccttgttgataatcccagaaacgcaaagtgcgatggtaactgccatttaccagcagggtgtcgaacatttcatcgacggtttgatcaagggaagagaaggggcggcggtcaatacccggctcaccatgaatgccgacgccaaactccatctcattatccgccagggtaaaagaaggtttgcccgcggcaggaacggtacaggcaccgagagcgatacctatactgtggccttgattattcagcttacgccccagttccgcacaggcgtccagactgtcgccacgctccgccgctgcgcctacgagtttttcaattaatacggtgttggcaacgccgcgtcgcccggcagtataaagactgtcttttaccgcaacgtcgtcatcaatgaccacagtggtcacttttacgccgctatcgtgcagtaactcggtcgctgtttcaaagttaagaatatcgccggtgtaatttttgataatcaacagtacaccttcgccgccatcaacttgcatggcgcattcaaagattttatcgggcgtcggactggtgaaaatttcgcccggacaggccccgctaagcatcccctgaccgatataaccacagtgcatcggctcgtgtccgctgccgccaccgctcagcagggcgacttttcctgcaacaggggcatcagctcgggtgacatacaccggatcctgatgcagtgtcaggcttggatgcgctttcgccagtcctgccagttgttcgtccagtacgtcttgcacatcattgatcaattttttcattattttgctccagcaattacggtagggcatggatgatgttcaacgacacggcgaccactgactgccgatgaatccattgtgcatcaggcaagggaaaagaaaattagcccaaattatgtttcatagtgaaacatatgctttaatgaatgttccatattgaaacttttacgtgtattaatacttaaaattgcgagccggaacaccttttgtcataagggatgcgggatatgagtggcgcttttaacaacgatggtcggggcatatctcccttaattgcaacctcctgggagcgatgcaataagctgatgaaacgggagacatggaacgtaccacatcaggcccagggcgtgacatttgcttctatttatcggcgtaagaaagcgatgctgacgctcgggcaggctgcgctggaagatgcctgggaatatatggcaccgcgagagtgtgcgctgtttatcctcgatgaaaccgcctgcattctcagccgtaatggcgatccgcaaaccttgcagcagctaagtgcactgggattcaatgacggcacgtattgcgccgagggaattattggtacttgtgcgctaagcttagcggctatctctggtcaggccgtgaaaacgatggccgatcaacatttcaaacaggtactctggaactgggccttttgtgcaacgccgttgtttgacagcaagggccgattgacgggaacaatagcgctggcgtgtccggttgagcaaactaccgcagctgatttgccgttgacgttggcaatcgcccgcgaggtcggaaatttactgctgacggacagtttgctcgctgaaactaaccgtcatttaaatcaacttaatgccctgttagaaagtatggatgatggcgtgattagctgggacgagcagggtaatttgcaatttattaatgcccaggcggcgcgggtcttgcgccttgacgcgacggcaagtcagggacgggcaatcactgaactcttaacgttacccgccgtattgcaacaagcaataaaacaggcacatccgctcaaacacgtagaagcaacctttgaaagccagcaccagtttattgatgcggtgataacccttaaaccgataatagaaacgcagggaaccagctttattttgttgctccatcctgtggaacagatgcggcagttgatgaccagtcaattaggaaaagtcagccataccttcgctcatatgccacaggacgatccgcaaacccgccgcttgattcattttggtcgccaggcggcgcgcagtagctttcctgtcctgctttgtggagaagagggcgtgggcaaggcactgctaagtcaggcaattcataatgaaagcgagcgtgctgcaggtccttatatcgccgtcaattgtgagttatatggtgatgctgcgctggcggaagaatttattggtggcgatcgcacggacaatgaaaatggccgtctgagtcggctggaactggcacacggcggcacgctgtttcttgaaaagattgaatatctggcggtggagttacagtctgctttgcttcaggttatcaagcagggggttatcacgcgactggatgcgcggcgtttaataccaattgatgtcaaagtgattgcaacaacgaccgcggacctcgcaatgctggtggaacaaaatcgttttagtcgccagctgtattacgcgctgcatgcatttgaaattaccatcccgcctctgcgtatgcggcgtggcagcattccggcgctggtgaataacaaattacgcagtcttgaaaaacgcttctctacgcggctgaaaattgatgacgatgccctcgctcgcctggtttcttgtgcatggccaggcaacgattttgaactttacagcgtcatcgagaatcttgctctgagtagtgataacgggcgcattcgcgtcagtgatttgccggaacatctgtttaccgagcaggcgacagatgatgtcagcgccacccgcctttccaccagtctgagttttgcggaagttgaaaaagaggcaattattaacgcagcccaggtcacaggcggtcgcattcaggaaatgagcgctttacttgggatcggccgcactacgctgtggcggaaaatgaagcaacatggcattgatgcagggcagtttaagcgccgggtatgaaagacagaaacgatttctgatacatcagagtgatctgtatttcattccggcgcacgctaacaattttcagcatcgtttaagggcttgtctatcccgcacttaaaagctgaagcgatatcctccgttgacttgcttctgatcaaagaggttaccctgcgtgtaatccgcttcgagatagaatgtgtgctgtttgttatactgtgcactgactcccacgccgttattccagccattacctttgaaactgtacttctcccgggagttgttcaacagatattcggtatccccactaaactcgcggatagcgccagtcttcacatagacattcagctggctgttgcctgcggtgatgtcataccccagtatcatgctggcacgccccagcaggctttcgtagtgattcagatgtatattgaggccattactcgccttcatagtcatctcattctggtggctgtatgtaagctgggtttgcggctctatatagaacccataaccagtaggggacaggttgaacctctgcccggcttccagggagatgctcattccattcgcagtgccgttggcgttaacgccgttgttctgactgtccagtacgtggaaactatttttctggcggcttgcttttataacgagatcgctgtaaaaaccgttttgtgccatgtaactggcgtacattcccatgtagtcactacgtgcggtaccgtcgcctccgctatagtccgggcttgcatgtgtactgccaatatacagaccgacatacaacggcattacatcagagagacgtttatccccaccaaactggataccgctgtaacccatgtcaaagccgctcagtttgccactggcaaaggagtccaggcttcccccataactgcgcaaccagatattaccgtctttactctgatttcgcaggtcacccatccgttgcatcagcgtacggttttcaacatagttcaataagtaaccgacattgagataattgccgccagcatctgcggtcgtggtgggtttaggcgtgggagcgggttcaggcgtaggatcggggttgactatgggaggctgagcgggagctggtgtgggttcaggattaggagtcggttccggaactgtcccggaagcgtaaagctcccagttagtgccatttttacgcacatcgtacagatatccccccaactcaacctgagaagacgcgctgaagctggccgcgccgtcagtggtttttaccactgtcagaacttcatttcccgttgtggcctcgctgccctggttgcggatagccaatacgtgattaccagcactactcccgctgatattcaataaatcccctttattattaacgccattaccctcgccaacaacatcagcacgcataataaaggtactgttaccgctcaggttctctacgtttaatgtggcaaatgtgccggcagtactcccgtggctggcaaaatcgacagtactatggctcagcgccagcgtgtcgagattagaattacttgttacgttccagacgctgttattcattgcaacgtccagttttccgccattgacattatcgctgagggaggaacctgtccaaacgttcccagggtgcatatccagattgattagcccacctttggaaagaacgctaccgttgataagcatacgaccgctggcgttgatgcggctggcggcataaccatcgtcatgttgcgttgcgatggccatctggtcgggtgtactcatatcaatgaccagatcgctcgtgaggtcgatctggctgttggtcatggcataaattcccctggctcctgccgcgccggtgatagccaaactgtctccggttattctaccgccgctgagagcccacaaacccagcgccagactgccattacgatcaactgtaatatcggtattttgcatgttgacaacagccgttgccgtctgggcgctggcaccataagaaccgccggaaaagatgctgtttcgttgcgctgccgtgccagtaaaattgattatcgcgtcactaccactggtgacgaggccaccgccctgcgcggaagaaatatggctatctgcaccgatagtggttgtaccaccacgaacttcgacgccattggccgcggctccagttacatcaacagtgagtgcattcgcgctaacctggccaaagctccagaggccgtgagcattatcgccattggttttaatggtactgtttgttccgagatcgacaacagagtttttctgtacgtttatccccatggcgctgtagccctgaacatcgattgtcaggtctgtagccgtaaaacgcgcagcaccattggcgttattgccgttgagaccaccgatataaacacctgtacttccatcggtcgtgattttacttccgcttccaagatcgacactggtgccatagtcattgatggttaggcctataccgttgctgttttcaatggtgaattgagtggctgttagtgtactgctatgcccaataatgatgccgtcatcgttactcttaatggtgctgcctgtgcctaagtcagcatgggtatagtcaccaattaagttaatgccgatggcagaggtttgaccaacaacatctactgtgagtcggttagctgtcagggagctgtttttgccctgaataatgattccttttgcatatccagaggcgtcgttgacattgacggtgacatcattacccaggttgatattgccaggcgtgtttcctgctggggtcattacaccatagaggtttccacttggatcggcggtatctcctgtaattctgtcaccatcattaatagtaatattggtgccatattgacttcctgtatcagcagctatcagcaggggggaaaagataattgcattcaaaccaatagcgccaaattttatcagttgaatactggggctacggatttttaattcagcgagacgatctgctttggtattcccattgtgttgtttgatgcccataccactcctatatagtacccagactatgggtctatggattttgtcattttgtttaaatcaatgaataatatcctcttatcatcatgatatttgtatggtgcaatcatgatgagcttctcagagaataattctctattaccgggcaaaatcaggaacacaggaattaatatatatttaacatcccccttacaaaggtgagtttatatcgagttattccctaagttgtcgttacttattccaattcgttactataaatatggcaaaaatattacaacaaacagcggttaaaaaatttggtgaagattttttgtaataatcctaattagttatgggaatttcgcttgatgtatctgcataacaaaaacaatatgcgccatttttgcattactaataagaaaaagcaaaaaacatcgatattcatttttggtcaatgggttttctggcctatcgttgttattgtgctactggttatcattttcatcttgccagcatattggagcgtgatcaattttgatcagctgtgaagggggctgatgtgtagtgatacaaaaacttacgttatatcactgctaatgagatatccggcatctgaacacttatgtctttaattattctcgtggttcactataggcaataagcacaaaagtgtaggatgttacaagaatgattaggactcggtgaaatgaaaaatccacgcaattgcgtggattttatatacttttgcgctcttcatgagatttagcgaaacctcatgagacaataaattaattagacgttgaaaaggaagttcatcacatcgccatctttcacgatgtaatctttaccttctgcacgcattttgcctgcttctttcgcgccttgttcacctttgtaagtgatgaaatcttcaaagctgatggtttgtgcacggataaagcctttttcaaaatcagtatggattttgcccgctgcctgcggcgcggttgctccaaccggaatggtccatgcacgcacttctttcaccccagcggtgaagtaagtttgcaggttcagcagtttataaccggcacggatcacacggttcaggcccggctcttccagcccaagctcctgcataaactcgtcacgttcttcgtcgtccagttcggcaatgtctgcttcaacagcagcacaaaccggaaccacaacagaaccttctttcgccgcgatttcacgcacctggtcaagatatgggttgttttcaaaaccgtcttcgttgacgttggcgatgtacattgttggtttcagcgtcaggaagctcaggtaacgaatagccgctttctcttcagcgcttaaatccagcgcgcgcagcatacctgcattttccaactggggcaggcatttttccaggaccgccagctcagctttcgcgtctttatcgccacctttggctttcttctgtacgcgatgaatcgcacgttcgcaggtgtcgaggtctgccagcgccagttcggtgttgataacttcaatatcgtcagccgggttaactttgccggaaacgtgaatgatgttgtcattttcaaagcagcgaacaacgtgaccgatcgcttcggtttcacggatgttggtcaggaactggttacccagaccttcgcctttgcttgcgccttttaccagaccggcgatatcgacaaattccatggtcgtgggaagcgtacgctgcggttttacgatttcagccagttgatccaggcgaggatcaggcattggtacgacgcctgtgttcggctcaatggtgcagaatggaaagttggccgcttcaataccggctttggtcagcgcgttgaacagggtagatttcccgacgttgggcaaaccgacgataccgcatttgaatcccatgatttaaatcaccttaatatcttaataatcaacctgttattgctaacagattgcagaaatggaaataactttgcctattatacacggcactcggcaaaaatgccgcagacaacgacttattgcgctttaaaggcgtgcaatcggttcgttgctttggtcaagccatctgtaaaccacatttcagtacaacgcgccgcttcgtcaatggcttcatcaattaacttctgttcactaacaggcggtttgcctaacacaaaaccgacaactttatttttatcgcccggatgaccgattccgatgcgtaaacggtgaaagttagggttattacccaatttactgatgatgtctttcagtccattgtgaccaccatggccaccgcccaatttaaatttggcgacgccaggaggcagatccagttcgtcgtgggccaccagaatttcgtccggattaatgcggaaaaaactggccatcgccgcaacggctttgccgctgagattcataaatgtagtcgggactaacaggcggacatcttcgcctccaagagtgactcggctagtataaccaaagaatttagcctcttcgcgcagcggagcgcgcaaacgctctgccagtaagtcaacgaaccaggtaccagcattatgtcgcgttgcggcgtattcagcaccggggttcgccaggccgacaatcaatttaatcgtcacgtttttttgtcctgagtgtgtacataactggcgcgtagtttactggttgcggccccgcttgacaaaaaactgcgtatcaaatgcagataacgtaataattgcctgagtggactattagaaagtcaaggtgttcaggcgtttatttgtaaagttttgttgaaataagggttgtaattgtgatcacgcccgcacataacccactgggtgttgtctatactttacacataaggaagaggggtattccctgttacaacccagaaagttccggaggtgacatatgaaacgcaaaaacgctagcttactcggtaacgtgctcatggggttgggtctggtggtaatggtggtcggcgtggggtatagtatcctcaaccagttaccacagtttaatatgccccagtatttcgcacatggtgcagtgctaagtattttcgtcggtgccattctctggctggcgggtgcccgtgttggcgggcatgaacaggtgtgcgaccgttactggtgggttcgccactatgacaaacgttgccgccgtagcgataatcgccgtcatagctaacaaataatgcagtttgctgaccagtcagtttgcgctgactggtcaatctcgtacttataaatccgccatcgccgcgcgacgattcgggaagaacgccaggcgtcccgggatcggttgaatgccagcgcgagccatagtgcgcagtggctggaattccacgttgcacacgcgcagttcacatccctcgggcagacgcttcacaaaacgctggaacgcatcaagaccaccagcatcaagtaccggaacggcatcccacttcagaatcacaatccgtttgccttcaagacgactctccaggtccgtgaataagccttcagcagcagcaaaaaacagcgggccaataacgcgcagaaccaggacatcgtctggaacatctacgactaccggtgccaggcgagtcatacgtgcgatacgacgcataaacagcaggcttgccagcacgatccccacgctgatggcaataaccatatcaaacaacacggtcaggctcatgcacagcagcatgacgatgatgtcatctttcggcgcatgacgcagcaagtcgaccactttgtgcgcttcactcatgttccacgccaccatcaacagcagggctgccatggcggaaagcggcagccaggagagcagcggtgccagtaccagcagggcaagaataaccagaatagagtggatcaccgcgctgataggggacgttgccccggcacggacgttagcggcagaacgcgcgatggcagctgtagcggtaataccaccaaagaacggagcgataatattccccagtccctgtccaaccagttcgctgttcgccttgtgtttcgtcccggtcataccatccagcaccacggcgcagagcagagattcgattgcgccgagcattgccatactgaatgccgcaggcagcagtgtgcgaatagaatcccaggttagcgtgaattcactattaggcagatcccacggcagcaccagttgcggcagcagttgcggaataccgttaccctgagaaccatcggccaggacgtagtggaattggctaccgatggtagcaacatgtccgccgagcaggttaacaatccccatcaccgcgcaaccagccagcaaggccggaaggtgaccgggtaaacgaatgcccagacgcggccaaaaaacaagaatacctagcgtcacaatgccaatggcagcatcacccacattaatggtcggcagcgccataaataatgcgccgactttttgtagataatgttccgggacatgggccatttgcagaccgagaaaatctttaatctgcatggtaccgatggtgatcccgataccgctggtgaaacctaaggtgacggaaaccggaatatactcaatcaggcgaccaaagcgtgccagacccatcagaatcaaaaagatcccgctcagcaaggtcgcaaccagcagtcctgccagtccaaactgttggctcacgggatagagaattaccacaaatgccgcagtcggaccggaaacgctaaagcgactcccacccgtcagagcaatgacaatccccgcaacagctgcggtatataaaccgtactggggtgccacaccactaccaatagccaacgccatcgccagcgggatagcaataatcccgacggttatcccggcaatcaggtcacgggtaaaccgtgcggcagtatatttttctttccagcaagcgtcgatcagagcgcggaaaggcatcacatgactggaaaatattttgttcacaataatgtttcatccgtgagcgcatcatctgtcaactaaatggcaggtgaaggaggcataggtcatacaaatggatattacagacaaaaaaacccgccgcagcgggtctttgagccgggttcgattagtgttcgaacatggcagagatgctttcttcgttgctgatacgacgaatcgcttcggccagcataccactcagggtcagagtacgcacgttcggcagacttttgatttcatcgctcagcggaatggtatcgcagacaacgacttcatcaattacagagttacgcaggttgttcgccgcgttgccagagaagatcgggtgagtcgcgtacgcaaatacacgtttagcaccacgttctttcagagcttcagcagctttacacagcgtaccgccagtgtcgatcatatcatcgaccagtacgcagtcacgacctgcaacgtcaccgatgatatgcatcacctgactaacgttcgcacgcggacgacgtttgtcgatgattgccatatcggtatcgttcagcagcttagcgatagcgcgggcacgcacaacgccgccgatgtccggagaaaccacaattgggttatccagattcagctgcagcatgtcttccagcaggatcgggctaccaaatacgttatcaaccggaacgtcgaagaaaccctgaatctgttcagcgtgcagatccactgtcagcacacggtcaacaccgacgctggagaggaagtctgcaaccactttcgcagtgattggtacacgagcggaacggacgcgacggtcctggcgcgcatagccaaagtaggggataacagcggtgatacgacctgcggaagcacgacgcagggcatcaaccataacgactaattccatcaggttgtcgttagtaggggcacaagtggactggatgatgaaaatatcaccaccgcgtacattttcattaatttgtacgctgacttcgccatcgctaaagcgacctacagcggcgtcgccgagactagtgtacaggcggttggcaatacgttgtgctagttccggggtggcgttaccagcaaaaagcttcatatcaggcacgagaagaacctcaggcatgcgtccattggtggaaagaatctgccgaaaactgtgcgggccaggcatgatcctttccaggcggtgtattaaagagcgcgatgcaacgtctggaacaaggtgacgttgtcaccgaaactcagcttgcccggcttaaagcatggctctgtgcaatggggaaagattagcgcctttcgccacaaagccattgagccattccggggcttgctctagcacctggcgggcttcagactctgtatcaaattcagcaaagacacaggcccctgtcccagtcaggcggctcggggcgtattctaacagccaggaaagcaccgcatcaacctcgcgaaaacgttttcttgcgataacctcgcaatcattgctgaattcacattttagcaacgtttctatactcctttttggcgtattgcgcgggagttcaggatctttaaaaatcaccggagtcggaatacttacaccagggtgcgccaccagataccacttctctggcggatccaccggcgttagtatttcaccaacgccttcggcaaacgcggcatgcccccgaacaaagacaggaacatctgcgcccagcgtcagccccatttccgccagctcatccatgcttagcccgcattgccagagatgatttaatgccaccaggaccgtcgcggcattggaactaccaccgccgagaccgccgcccatcggcaaacgcttgtcaatgctgatattcgcaccgcttcccgtcggaagacgcccgctgtctgccgcagttttcatcaacaatcgcgctgcgcgaacgatcaggttatcttcatgttccacgccttcaacgggcgttaacagacgaatatccccatcgtcacgaagctcaatgctgatggtgtcgccgtaatcaagaaactgaaacagcgtttgcagcgtgtggtaaccatccgcacgctgaccggtaatgtataaaaacagattaagttttgccggagagggccactgtgtccgcattatttcactatccagttatccatttttaacttgatgcgttgaccaccgtcggtgagttccatattggctggcatcgcaggttgcgttttggtgtcataaccaccataaacaaccttccagtttttgccattctggctgtaggtaatttcgctcaggcggtactggtcgtccagtttgtagtcggttgcatcacccggtaaacctaaaatccactggcgcaagctgttgagcggaattggcattccggtcaatttgccaatcatctcttcggcgtcatcggcggtataacgctgacctttattgtcgactaactgcacgttacccggttgagcattcagctccagttccgtgctgcccaatgggttagtgagcagcagacggtagcgatcctggccggtttgctgccagaaaaagcgggcgtacactttttgttggtcagaaatataagcgaacgcgccgcgagtctgatactgattaagattgcgcacgtcttgctgatgctgacgccattgtgggctatccgggcttttgccaggacctttgggcgtggtaacggaacaggcagtgagcacaagagcagccagcggtagcaggcggataagacgaaaatcgggcaggggcatagtgatgacaagtccttgagatacgttgcagttataacccttaatgctagcgttaccgtccgctatcgtctatgttcaagttgtcttaattgccagaatctaacggctttcggcaattactccaaaagggggcgctctcttttattgatcttacgcatcctgtatgatgcaagcagactaaccctatcaacgttggtattatttcccgcagacatgacccttttagcactcggtatcaaccataaaacggcacctgtaagcctgcgagaacgtgtaagctttagcccggataagctcgatcaggcgcttgacagcctgcttgcgcagccgatggtgcagggcggcgtggtgctgagcacgtgcaaccgcacggaactttatcttagcgttgaagagcaggacaacctgcaagaggcgttaatccgctggctttgcgattatcacaatcttaatgaagaagatctgcgtaaaagcctctactggcatcaggataacgacgcggttagccatttaatgcgtgttgccagcggcctggatagtctggttctgggggagccgcagatcctcggtcaggttaaaaaagcgtttgccgatagccaaaaaggtcatatgaaggccagcgaactggaacgcatgttccagaaatctttctctgtcgcgaaacgcgttcgcactgaaacagatatcggtgccagcgctgtgtctgtcgcttttgcggcttgtacgctggcgcggcagatctttgaaagcctctctacggtcacagtgttgctggtaggcgcgggcgaaactatcgagctggtggcgcgtcatctgcgcgaacacaaagtacagaagatgattatcgccaaccgcactcgcgaacgtgcccaaattctggcagatgaagtcggcgcggaagtgattgccctgagtgatatcgacgaacgtctgcgcgaagccgatatcatcatcagttccaccgccagcccgttaccgattatcgggaaaggcatggtggagcgcgcattaaaaagccgtcgcaaccaaccaatgctgttggtggatattgccgttccgcgcgatgttgagccggaagttggcaaactggcgaatgcttatctttatagcgttgatgatctgcaaagcatcattagccacaacctggcgcagcgtaaagccgcagcggttgaggcggaaactattgtcgctcaggaaaccagcgaatttatggcgtggctgcgagcacaaagcgccagcgaaaccattcgcgagtatcgcagccaggcagagcaagttcgcgatgagttaaccgccaaagcgttagcggcccttgagcagggcggcgacgcgcaagccattatgcaggatctggcatggaaactgactaaccgcttgatccatgcgccaacgaaaagtcttcaacaggccgcccgtgacggggataacgaacgcctgaatattctgcgcgacagcctcgggctggagtaacagtacatcattttctttttttacagggtggaggaggaataatggaatatcaacactggttacgtgaagcaataagccaacttcaggcgagcgaaagcccgcggcgtgatgctgaaatcctgctggagcatgttaccggcagagggcgtacttttattctcgcctttggtgaaacgcagctgactgacgaacaatgtcagcaacttgatgcgctactgacacgtcgtcgcgatggtgaacccattgctcatttaaccggggtgcgagaattctggagcttgccgttatttgttagcccagcgaccttaattccgcgcccggatacggagtgtctggtggagcaggcactggcgcggttgcctgaacaaccttgccgtattctcgatctcgggacgggtaccggggcgattgcgcttgcgctggctagcgagcgcccggactgcgaaattatcgctgtagatcgtatgcctgatgctgtctccctggcacaacgtaatgcccagcatctggcgatcaaaaatatccacattctgcaaagcgactggtttagcgcgctagccgggcagcagtttgcgatgattgtcagcaatccgccgtatattgacgagcaggaccctcatcttcaacaaggcgatgtccgctttgagccgctcactgcgctggttgcggcagacagtggaatggcagacatcgtgcatatcatcgaacagagccgtaacgcgctggtatccggcggctttctgcttctggaacatggctggcagcagggcgaagcggtgcgacaagcatttatcctcgcggggtatcatgacgtcgaaacctgccgtgactatggtgataacgagcgcgtaacgctcggccgctattatcaatgacaagtttttctacactgcttagtgctcatcttattagtatcgcgctttctgttgggctattaaccttacgtttctggctacgttatcagaagcatccacaggcatttgctcgctggacgcgcattgtgccgccggttgtcgatacgctgttactgttaagcggcattgcgttgatggctaaagcgcacatcctgccattttccgggcaggcacagtggctgactgaaaagctgtttggagttatcatttatatcgttttgggttttattgcactcgattatcgtcgtatgcacagtcagcaggcgcgcattattgccttcccgctggcgttggtggtgctgtacatcatcattaaactcgccaccacaaaagtaccgttactggggtaagtcatgagaagcttagctgatttcgaatttaataaagcgccattgtgcgaaggcatgatcctggcttgcgaagcaatccgccgcgattttcccagccaagatgtttacgacgaactggagcgtctcgttagtctggcgaaggaagaaatcagccagcttctgcctttagaagagcagttggaaaaactgatcgcgctgttttacggcgactggggatttaaagccagtcgcggtgtttatcgtctttccgatgcattatggctggaccaggtgttaaagaatcgacagggcagtgcggtaagtttaggtgcggttttattatgggtcgcgaatcgtctcgatttgccgctgctgccggtgattttccctacgcagctgatattgcgcattgaatgtccggatggcgaaatttggctgattaatccttttaacggtgaaagcttaagcgaacatatgctggacgtatggttaaagggaaatatcagcccgagcgcggaactgttttatgaagaccttgatgaagctgataacattgaggtaatccgcaaattgctggatacactcaaagccagcttgatggaagaaaatcagatggagctggcgttacgcaccagcgaagctttattacaattcaaccctgaagatccctatgaaattcgcgatcgcgggttgatttatgcgcaactggattgcgaacacgttgcgttgaacgatttaagttatttcgttgaacagtgtccggaagacccgatcagcgaaatgatccgtgcgcaaataaataacatcgcgcataaacatattgtgctgcattaattaatcgacattttactcaagattaaggcgatcctatgaaacaaaaagtggttagcattggcgacatcaacgtagcaaatgacctgccgttcgtactgtttggcggtatgaacgtgttggaatctcgcgatctggcgatgcgcatttgcgagcactacgtaactgtgacccagaaactgggtatcccttacgtgttcaaagcctcttttgacaaagccaaccgctcctccatccactcttatcgtggaccgggcctggaagaagggatgaaaatcttccaggagttgaagcagacttttggcgtgaaaattatcaccgacgttcacgaaccaagtcaggcacagcccgttgctgatgtcgtggatgtgattcagttgccggcgtttcttgctcgccagactgacctggttgaagccatggcgaaaaccggtgcggtaattaacgtcaagaaaccacagtttgtcagcccgggacagatgggtaatatcgttgataaattcaaagaaggcggcaacgaaaaagtgattctttgcgatcgcggtgctaacttcggctatgacaacctggttgtcgatatgctgggcttcagcattatgaagaaagtgtctggtaacagcccggtgattttcgacgtgacccacgcactgcaatgccgcgatccgtttggcgcagcttccggtggtcgtcgtgctcaggtggctgagctggcacgagccggtatggcggtaggtctggcggggctgtttattgaagcgcatccggatccggaacatgcgaaatgtgatggtccatccgcgctgccgctggctaaactggaaccgttcctcaagcagatgaaagcgattgatgatctggtgaaaggtttcgaagaactggataccagcaagtaatcttttttgcttgaaaaataaagtattagcgttctgcgttaagacttttttcatgggtgccggatacaaaaaaggccgcaggctgttacccctgcggccggtttcgggcgcatattgccatcacggcagcctgacgcccgttttcaccttacttccggttacgccaccagctgacaatcgctgcggtaataattcccgccaggatcggtgctgccaggtcgtgccagaaaatcatggcaaactgcgcgagcgtcatatagccgccttgttgtaatgacaacattttgcggctattcttgaattgttctggttcaagattagcccccgttctgttgtcaggttgtacctctcaacgtgcgggggttttctctttccagcaaccaatgccaccagggataaagcccccgcaacattgcgcctcaccggataacgccggcttggtgtggatactacgactcaattcatcttcacttcatccctgaaatgtttgcaatgaagagtgcattccggtttttcaacagctgttacagtcatttcatgagtgctctggatgaggcttccagctcgggttgccaatatttacttgtggaagtgataaagacaaaaatggccgcaggctgttacccctgcggccggtttcgggcgcatattgccatcacggcagcctgacgcccgttttcaccttacttccggttacgccaccagccgacaatcgctgcggtaataattcccgccaggatcggtgccgccaggtcgtgccagaaagtcatggcaaactgcgcgagcgtcatatagccgccttgttgtaatgacaacattttgcggctattcttgaagtgtctggtttcaagattagcccccgttctgttgtcaggttttacctctcaacgtgcgggggttttctctttccagcaaccaatgccaccagggataaagcccccgcaacattgcgcctcaccggataattccggcttggtgtggatactacgtctcaattcatcttcacttcatccctgaaatgtttgcaataaagagtacattccggcttttcaacagctgttgcagtcgtttcatgagtgctctggatgatgcttccagctcgggttgccaatatttacttgtggaagagataaagacaaaaatggccgcaggctgttacccctgcggccggtttcgggcgcatattgccatcacggcagcctgacgcccgttttcaccttacttccggttacgccaccagctgacaatcgctgcggtaataattcccgccaggatcggtgctgccaggtcgtgccagaaaatcatggcaaactgcgcgagcgtcatatagccgccttgttgtaatgacaacattttgcggctattcttgaagtgtctggtttcaagattagcccccgttttgttgtcaggttttacctctcaacgtgcgggggttttctctttccagcaaccaatgccaccagggataaagccccgcaacattgcgcctcaccggataacgccggcttggtgtggatactacgtcgcaattcatcttcacttcatccctgaaatgtttgcaatgaagagtacattccggcttttcaacagctgttgcagtggtttcgtgcagggtgtggtacaggctcgcaattctgattaacgacctgtccaggtagtatgaagaaatacaataagcaggaatttatattatctcccccgattaccgtcatcggaggagatataactgtcaggcaaatatcgtcatcaaataggcggcaaacagtgccagatgcgctgcgccattgagcatgttagtacgtccggtggagaaggagatatggcacagcactaaagaggccaccatcaccaccatttctggcgcaccaagtgcaaactgcaattcgttacccgtcataaaggcaattagcgtgacgacaggtacggtaaggctaatggttgctaacacactaccaaagaacagattcatcgcgcgctgaacctggttgttcaacactgcttttaatgcacctaaaccttccgggctcagaatcaacagtgccaccaggaagccagtaaaggcgacaggggcattcatgctgtcgagcaatgtctccaggctgctggcgttcattttggtcaccgcaataacggcaatcagatggataatcaaccagatagcatgccacaggctgctatgggcagacggtttaccgtgatgcgggtcgtcatcatcactgtcatcttcgtgctcgtagacaaacaaactttgatgcgttttggtctggatcagcaaaaatacgccatacattgccgcagaaattaatgctaccagtaacgcctgaccggtactaaaattcgccgcaggcagagccattggaaataccagtacgattatcgccagggggaacagcgcaattaaatactgcttgataccaaacagattcatatattgggtggcaaacttacgaccgcccaacaataaactaaagccaaccagcccaccggtaacaatcataatgatactatagagcgtatcacgcattagcgttggcgcggcgtcgccggttgccattaaagcactaatcaaactgacttcaagaataaccacactaaggctaagaataaggctaccgtaaggttctcccaggcgatgggctaatacgtccgcatgacggacaacactaaaggcgctacttaaaataccaataagcgcaagaagattgatggcaatgaccactggtagtgtctggctgcttccccacaggaacagcactaccagcgccagaaccgggaaaataaggctagtctccttgtggcgggtttttaccgcctcttgagcattactcattatggttatccctttgcagatgaatttatcgaaaatgtaaaaaataggtaggaaaaataacagaaagtgtctggatatcggtaacattttacgaatttttaccccgctgtcgattttttactcattggggcataaaaataagtattacgtttagacaatgtttgttttagcgtctcttaagaagagtctgacctgaaaattcttatgttttggcaagagtagatattgttgaccacacttaatgttcaactttgtaaaaggagtcaacgatgccgtataaaacgaaaagcgatctgccggaaagcgtaaagcacgttctaccgtctcatgcccaggatatctataaagaagcgttcaacagcgcatgggatcaatataaagataaagaagatcggcgtgatgacgccagtcgcgaagaaaccgcgcataaagtggcctgggctgctgtgaagcatgaatatgccaaaggggatgatgataaatggcataaaaaaagctaaaaccggtcgcttagttaaagctattcgtgcggtgttgccttgcaagtggtccgtggattgcatattgtcccgttagtggtttcaaaatgagcagtaaaaatgtccggaagacaccaaaaagttgtcgcagggaagtatgcagtggcggaagtgtaaggtgataacgcgtgatttcttgatgaatgccgattgtaaaacggcatttggtgccattgaagaaagtctcttatggagtgcagaacaacgggcggctagcctggcggcgacgctggcttgtcgacctgatgagggaccggtgtggatcttcggctatggaagcttgatgtggaatccggcactggagtttaccgaaagctgcaccggtacactggttggatggcatcgcgcattttgcctgcgcctgaccgccgggcgcgggactgcgcaccagccgggacggatgcttgcactgaaagagggcggacgcaccacaggcgtcgcctatcgactgccagaagagacgctggagcaggaactaaccctgttgtggaagcgagagatgattaccggctgttatctgccaacctggtgtcagcttgatcttgatgatggacgcacagtaaacgccattgtgtttattatggacccgcgacatccagaatatgaatctgatactcgcgctcaggtcatcgcgccgttgattgcggcggcgagcggtccgctgggaaccaacgcacaatacctgtttagtctggaacaggagcttatcaaactgggaatgcaggacgatgggctgaatgatttgctggtaagcgtaaaaaaactgctggcggagaattttccggatggtgtgttacgtccgggattcgcctgagtaaacttcccgcatagtggggcgtcagacgccccctcaaacattaaaatgtgagcactttatcggcactcagcgtccattgcgccagttccacaagagtaccgatttccaccccatcaatcagaggaagtgtactaatcccgcgcccgtcggtacaggttttgcacaatttcaccggtacattctgagcggtaaggatctccagcatttgctgaatgttgtagccttcccctggtttttgcccgcgcaacccggctgtgaccgcatcagacatgaggaacagacgcagatccagattgctctcctgctctcgtaacgcaatggccagccgcaagctgttaaacaaggattcgctcccgtaaggtgcgccattggcaacgatcacgattttttgcattatttactcctgtattcagggaattagacactcatcttctatcttactgcttctgcagcgtctgaccaatcggtcacatttttaaggattttcctgaaagcgcgagaaaatacgacaaaagttgccagtaatcgttattctttaaggctatggtttttcattattaccggaagttaccgacgttttgagccgtttcgttcctcgcattatcccgttttatttactcttgcttgtagcaggcggtacagctaacgcacaatctaccttcgagcaaaaagcggcaaatccctttgataataacaatgatggtctgccggatttaggcatggctcccgaaaatcatgatggggaaaaacactttgctgaaattgtgaaagatttcggcgaaaccagtatgaatgataacgggctggatactggcgagcaggcaaaagctttcgcattgggaaaagtccgcgacgcgcttagtcaacaggttaatcagcacgtagagtcctggctaagtccgtggggaaatgccagtgttgacgtcaaagtggataacgaaggacatttcaccggcagtcgtggaagctggtttgtgccgttacaagataatgatcgttatctcacctggagccagcttggtcttactcagcaggataatgggttggtgagcaatgtgggcgttgggcaacgctgggcgcgcggcaactggctggtgggttataacactttttatgacaacttgctggacgaaaatcttcagcgagcgggctttggtgccgaagcgtggggcgaatatttgcgattaagcacaaacttttatcagccgtttgctgcatggcatgaacagacagccacgcaggaacaacggatggcgcgcgggtacgacctgacagctcggatgcgcatgccgttctatcaacacctcaataccagtgtcagcctagaacagtattttggtgatcgtgttgatttgtttaactctggtacgggttatcacaatcccgtcgcgttgagtctgggattaaattacacccctgtgccattagtcactgtgacggcccagcataaacagggtgaaagtggcgaaaatcaaaataacctcgggctgaatcttaattaccgctttggtgtaccgctcaaaaaacaactttctgcgggcgaggttgccgaaagtcagagcttacgtggtagtcgctatgacaatccgcagcgaaataatctaccgactcttgagtaccgacagcgaaaaacgttaacggtgtttctggcgacaccgccgtgggatctaaaacctggcgaaacagtgccgctgaaattacaaatccgcagtcgttacggtattcggcaactgatttggcagggcgatacgcagatattaagtttgacgccgggcgcacaagccaacagcgcggagggctggacgctgatcatgcctgactggcagaacggggaaggggcaagcaatcactggcgattgtctgtggtggtggaagataaccaggggcagcgtgtctcctccaatgagatcacgctaacgcttgtcgaaccgttcgatgcattgagtaacgacgaactgcgctgggaaccgtaatcagaaaatgcgctcctgatgcacccataccgctgcttccacgcgagacttgagcttcattttcttcagcatgtgcttgacgtgcacttttactgtgctttcggtgatatccaggcggcgggcaatcatcttgttcggcaaaccctgggcaatcagcttgagaatatcgcgctcgcgtggggttaactggttaacatcgcgctcagtagtggcacggttagcgcgcaagctggcggccagaacaggcgttaatgcttcgcttaataccatttcgccagcagctgcctgatgcaatgctttcagcagatcttccggttccatatcttttaacagatagccatccgcgccgcgtttcagtgcggtgaccacatcttcttcatggttagagacgctgaataccacaatgcgcccactgagggacttttcgcgcagtttatccagcgtttccagaccgttcatgccgggcatattgagatctaacaggatcagatcgggatcaagagactccgccagttcaataccctgttcgccattactcgcttcgccaaccacggtgatatctggtgccatactgataagctgttttacgccagttcgcagcatcgggtgatcgtcaatcagcaggatagtagccggttcctgattactcatgggtatctccttggacgtctgtgaaagttttttcgggaataaaggtgaccaccacttcggtgccaccactttcacgacggcggacgcggcaatcgcctcgtaaactttgcgcacgatcgcgcattattatcatgccgtagtgattgctgcggatggcattttcaggcacgccgcagccgttatcctggacggtcagtttgacctgattatcgttttgcgccaccgtcaccacgacttcactcgcttggctatgtttgagggcgttacttaatgcctcacgggcaatttgcaacaagtggattgcctgatggctaggcaccaggcgaggcggcaattgataatccagcttcaccgggaagccaaatttggcgctgtactcttcgcaactcgcctccagcgccggacgtaatccaggctcggtgagctgcaagcggaatgtggtgagcaattcacgcaactgcgcccaggatgcattcagttcgttacggatctgacttaacagttcgcggctgctttctggcagcgcatcgccctgcatctgtaaacaactcacctgcatcttcatgcaagagagagattgggcaatagaatcatgcagttcgcgcgcaatggtggcacgctcttccatcacgatcaactgttgctgacgttcctgatggcgatccagcgccagcgtggcggtgagttgttcaaccagggtatccaccagttgttgttgatcatggctaagatgacgcccctgcggcagggtcgccagcaaaataccgtactgcgtatgagagtcagccagccgccacttcagggtcgtgccgcgatcaccaacgggtaatacgccgcgcgggcagagctggcagcctttatcatcacaagtcatatctggctggcaggtaaactcctgatgattctcttcatcatcagtgtcatacacccgcaattcgatatcacgtagcagggttaaattctgtaagccgttgagtacaggactcaggcgttcacacagcggggcgcgggaatgcaaacggcggttagcctgccataaaaaagagaggatctgatttttatgctccagcccggcggttttctcctgaacccgctgctcaagtacggcataactttcggccagttctgcagacatattgttcaacgcagttccaagcatcgccatttcgttgcgcccgctgatgtttgcgcgttgggtaaaatcgcgatgactgacggcactcgccattgccagcagttgccgccacggttgtagcagtcgcgcccgcaaccagataatagtgaacaccagtaaaagtgccataaataccgccattacccgatggaccagtaccactgtctcgatgcgcatttccgtggtgcggtcaaaaccagataccagttgatcaagcccggcaacaaactggctgacatccgcactcaccgtttctcggttttgtgcacgcatcagcgcagggatcagttcattacgccagtaatcttgtaaaccctgtaattgcgccagttgtccgtctcgttctgctgctcgagtcaactcggcgctaaatgccgtttgttccatctctttaattaagggcttgtctttctcgcttaatggcactgccgccaacagacggtaactttgcatgcgcaggcttcccgctttgttgatcgcatgggcgctgccctgaacgccttgcaccagccagccagaaaccgccatccctgccagtccaatagcagtagaaagcaacacaataagcgcaacctgattaaccagggtgagcggagagagacaacgtttaagcatgtaaacctcttccttcaggctttaaatgagcaataaccttaatgaatgtgacgatacattctggaatggcagtattctcggctattggctgaagtatacccatacccggaaagagttactccttatttgccgtgtggttagtcgctttacatcggtaagggtagggattttacagcaccgtgaaaaatctcataatttttatgaagtcactgtactcactatgggtaatgataaatatcaatgatagataaagttatcttatcgtttgatttacatcaaattgcctttagctacagacactaaggtggcagacatcgaaacgagtatcagaggtgtctatgagtcacagttccgcccccgaaagggctactggagctgtcattacagattggcgaccggaagatcctgcgttctggcaacaacgcggtcaacgtattgccagccgcaacctgtggatttccgttccctgtctgctgctggcgttttgcgtatggatgttgttcagcgctgttgcggtgaacctaccgaaagtcggctttaattttacgaccgatcagctatttatgttgactgcgctgcctagcgtttctggcgcgttattacgtgttccatactcctttatggttcctatcttcggtggtcgtcgctggacggcgttcagcaccggtattctgattattccttgcgtctggctgggttttgccgtgcaggatacctccacgccttatagcgtcttcatcatcatctctctgctatgcggctttgctggcgcgaacttcgcatccagtatggcaaacatcagcttcttctttccgaaacagaagcagggtggcgcgctgggtctgaatggtggtctgggaaacatgggcgtcagcgtcatgcagttggttgctccgctggtggtaagtctgagcattttcgcagtatttggtagccagggcgtcaaacagccggatgggactgagctgtatctggcgaatgcgtcctggatatgggtgccgttccttgccatcttcaccattgcggcgtggtttggcatgaacgatcttgctaccagcaaagcctccatcaaggagcagttgccggtactcaaacggggtcatctgtggattatgagcctgctgtatctggcaaccttcggctccttcatcggcttctccgcgggctttgcaatgctgagtaaaacgcagttcccggatgttcagattctgcaatacgctttcttcgggccgtttattggtgcgctggcgcgttctgcaggtggtgcattatctgaccgtctgggcggaactcgtgtcacgctggtgaactttattctgatggcgattttcagcggcctgctgttcctgaccttaccgactgacgggcagggcggaagcttcatggcgttcttcgcggtcttcctggcgctgttcctgacagctgggctgggtagtggttccactttccagatgattagtgtgatcttccgtaaactgacaatggatcgcgtgaaagcagaagggggttctgacgaacgtgcgatgcgtgaagcggcaaccgacacggcggcggcgctgggtttcatctctgcgattggcgcgattggtggcttctttatcccgaaagcgtttggtagcagcctggcattaacgggtagcccagtcggcgcaatgaaggtatttttgattttctatatcgcctgcgtagtgattacctgggcggtatatggtcggcattctaaaaaataaaccgttactcgtcatacttcgggttacatgtgctgcggctgcgttcattcaccccagtcacttactttagtaagctcctgggattcattcacttgccgccttcctgtaaaccgaattatatagagtaaaatatttgattatcctttgcgcggcatgatgtcgcgctttttttatgcgtcatttagttacaacatactaatgttatatggtttatttcgccggatttcattaagagccattaatatgttacccatggggaatactccttaatacccatctgcataaaaatcttaatagtttaaataactacaggtataaaacgtcttaatttacagtctgttatgtggtggctgttaattatcctaaaggggtatcttaggaatttactttatttttcatccccatcactcttgatcgttatcaattcccacgctgtttcagagcgttaccttgcccttaaacattagcaatgtcgatttatcagagggccgacaggctcccacaggagaaaaccgatgagtaaattcctggaccggtttcgctacttcaaacagaagggtgaaacctttgccgatgggcatggccagcttctcaataccaaccgtgactgggaggatggatatcgccagcgttggcagcatgacaaaatcgtccgctctacccacggggtaaactgcaccggctcctgcagctggaaaatctacgtcaaaaacggtctggtcacctgggaaacccagcagactgactatccgcgtacccgtccggatctgccaaaccatgaacctcgcggctgcccgcgcggtgccagctactcctggtatctttacagtgccaaccgcctgaaatacccgatgatgcgcaaacgcctgatgaaaatgtggcgtgaagcgaaggcgctgcatagcgatccggttgaggcatgggcttctatcattgaagacgccgataaagcgaaaagctttaagcaggcgcgtggacgcggtggatttgttcgttcttcctggcaggaggtgaacgaactgatcgccgcatctaacgtttacaccatcaaaaactacggcccggaccgtgttgctggtttcagcccaattccggcaatgagcatggtttcttacgcaagcggtgcacgctatctcagcctgattggcggtacttgcttaagcttctacgactggtactgcgacttgcctcctgcgtctccgcaaacctggggcgagcaaactgacgtaccggaatctgctgactggtacaactccagctacatcatcgcctgggggagtaacgtgccgcagacgcgtaccccggatgctcacttctttactgaagtgcgttacaaagggaccaaaactgttgccgtcacaccagactacgctgaaatcgccaaactgtgcgatctgtggctggcaccgaaacagggcaccgatgcggcaatggcgctggcgatgggccacgtaatgctgcgtgaattccacctcgacaacccaagccagtatttcaccgactatgtgcgtcgctacaccgacatgccgatgctggtgatgctggaagaacgcgacggttactacgctgcaggtcgtatgctgcgcgctgctgatctggttgatgcgctgggccaggaaaacaatccggaatggaaaactgtcgcctttaataccaatggcgaaatggttgcgccgaacggttctattggcttccgctggggcgagaagggcaaatggaatcttgagcagcgcgacggcaaaactggcgaagaaaccgagctgcaactgagcctgctgggtagccaggatgagatcgctgaggtaggcttcccgtactttggtggcgacggcacggaacacttcaacaaagtggaactggaaaacgtgctgctgcacaaactgccggtgaaacgcctgcaactggctgatggcagcaccgccctggtgaccaccgtttatgatctgacgctggcaaactacggtctggaacgtggcctgaacgacgttaactgtgcaaccagctatgacgatgtgaaagcttataccccggcctgggccgagcagattaccggcgtttctcgcagccagattattcgcatcgcccgtgaatttgccgataacgctgataaaacgcacggtcgtagcatgattatcgtcggtgcggggctgaaccactggtatcacctcgatatgaactatcgtggtctgatcaacatgctgattttctgcggctgtgtcggtcagagcgggggcggctgggcgcactatgtaggtcaggaaaaactgcgtccgcaaaccggctggcagccgctggcgtttgcccttgactggcagcgtccggcgcgtcacatgaacagcacttcttatttctataaccactccagccagtggcgttatgaaaccgtcacggcggaagagttgctgagtccgatggcggacaaatcccgctataccggacacttgatcgactttaacgtccgtgcggaacgcatgggctggctgccgtctgcaccgcagttaggcactaacccgctgactatcgctggcgaagcggaaaaagccgggatgaatccggtggactatacggtgaaatccctgaaagagggttccatccgttttgcggcagaacaaccagaaaacggtaaaaaccacccgcgcaacctgttcatctggcgttctaacctgctcggttcttccggtaaaggtcatgagtttatgctcaagtacctgctggggacggagcacggtatccagggtaaagatctggggcaacagggcggcgtgaagccggaagaagtggactggcaggacaatggtctggaaggcaagctggatctggtggttacgctggacttccgtctgagcagcacctgtctctattccgacatcattttgccgacggcgacctggtacgaaaaagacgacatgaatactagcgatatgcatccgtttattcacccgctgtctgcggcggtcgatccggcctgggaagcgaaaagcgactgggaaatctacaaagccatcgcgaagaaattctccgaagtgtgcgtcggccatctgggtaaagaaaccgacatcgtcacgctgcctatccagcatgactctgccgctgaactggcgcagccgctggatgtgaaagactggaaaaaaggcgagtgcgacctgatcccaggtaaaaccgcgccacacattatggtcgtagagcgcgattatccggcgacttacgaacgctttacctctatcggcccgctgatggagaaaatcggtaatggcggtaaagggattgcctggaacacccagagcgagatggatctgctgcgtaagctcaactacaccaaagcggaaggtccggcgaaaggccagccgatgctgaacaccgcaattgatgcggcagagatgatcctgacactggcaccggaaaccaacggtcaggtagccgtgaaagcctgggctgccctgagcgaatttaccggtcgtgaccatacgcatctggcgctgaataaagaagacgagaagatccgcttccgcgatattcaggcacagccgcgcaaaattatctccagcccgacctggtctggtctggaagatgaacacgtttcttacaacgccggttacaccaacgttcacgagctgatcccatggcgtacgctctctggtcgtcagcaactgtatcaggatcaccagtggatgcgtgatttcggtgaaagcctgctggtttatcgtccgccgatcgacacccgtagcgtgaaagaagtgataggccagaaatccaacggcaaccaggaaaaagcgctcaacttcctgacgccgcaccagaagtggggtatccactccacctacagcgacaacctgctgatgctgactttaggtcgcggtggtccggtggtctggttgagtgaagccgatgccaaagatctgggtatcgccgataacgactggattgaagtcttcaacagcaacggtgctctgactgcccgtgcggttgtcagccagcgtgttccggcagggatgaccatgatgtaccacgcgcaggaacgtatcgttaacctgcctggtagcgaaattacccaacagcgtggtggtatccataacagcgtcacccgtatcacgccgaaaccgacgcatatgatcggcggctatgcccatctggcatacggctttaactactatggcaccgtaggttctaaccgcgatgagtttgttgtagtgcgtaagatgaagaacattgactggttagatggcgaaggcaatgaccaggtacaggagagcgtaaaatgaaaattcgtagtcaagtcggcatggtgctgaatctcgataagtgcatcggctgccacacctgtagtgttacctgtaaaaacgtctggaccagccgtgaaggcgtggaatatgcgtggttcaacaacgtggaaaccaagccgggccagggcttcccgactgactgggaaaaccaggaaaaatacaaaggcggctggatccgtaaaatcaacggcaaactgcagccgcgcatgggtaaccgtgccatgctgctgggtaaaatcttcgctaacccgcatctgccggggatcgacgattattacgagccgttcgattttgactatcagaacctgcataccgcgccggaaggcagcaaaagccagccgattgcccgtccgcgtagcctgattaccggggaacggatggcgaaaatcgaaaaagggccgaactgggaagatgacctgggcggtgagtttgacaaactggcgaaagacaagaacttcgacaacatccagaaggcgatgtatagccagttcgaaaacaccttcatgatgtatttgccgcgcctgtgcgaacactgcctgaacccggcatgtgtggcgacctgcccgagcggtgcgatttacaagcgtgaagaagatggcatcgtcctgatcgaccaggataaatgccgtggctggcgtatgtgcatcactggatgcccgtacaaaaaaatctacttcaactggaagagcggtaagtctgagaagtgcatcttctgctatccgcgtattgaagcgggtcagccgaccgtgtgcagtgaaacctgtgtcggtcgtatccgttatcttggcgtgctgttgtacgatgccgacgctattgaacgtgcagccagcaccgagaacgagaaagatctttaccagcgtcagctggacgtgttcctcgatccgaacgatccgaaagtcatcgagcaggcgattaaagacggtattccgctgagcgttattgaagccgcacagcagagcccggtttataaaatggcaatggaatggaaactggcgctgccgctgcatccggaatatcgcacactgccgatggtctggtacgtgccgcctctgtctccgattcagtctgcagcagacgcgggtgagctgggtagcaacggcattctgccagacgtcgaaagcctgcgtattccggtacagtatctggcgaatctgctgaccgccggtgataccaaaccggtactgcgcgcactgaaacgtatgctggcgatgcgtcattacaaacgtgctgaaaccgttgacggtaaagttgatacccgtgcgctggaagaggtcggtctgaccgaagcccaggcacaggagatgtaccgttatctggcgattgctaactacgaagatcgctttgtggtgccgagtagtcatcgtgaactggcacgggaagccttcccggagaaaaatggctgcggctttacctttggtgatggctgccacggtagtgataccaaattcaatctgttcaacagccgtcgtatcgatgccatcgatgtgaccagcaaaacggagccgcatccatgatcgaactcgtgattgtaagccgtctccttgaatatccggatgctgccttatggcagcatcaacaagagatgtttgaggcgattgccgcgagcaaaaatctgccaaaagaggatgcccatgcgctgggcattttcctgcgcgatttaacgacgatggatccgctcgatgcccaggcgcagtacagcgaactgttcgaccgtggccgcgccacgagtctgttgctgtttgaacatgtgcacggcgaatcccgcgaccgcggccaggcgatggtggacctgctggcgcagtacgagcagcacggcttgcagttaaacagccgcgaattgccggaccatctgccgctgtatctggagtacctggcgcagctgccgcaaagcgaagccgtggaaggtttgaaagatatcgcgccgattctggcattgctgagcgcgcgtctgcaacagcgtgaaagccgttatgccgtgctgtttgatctgctgctgaaactggcgaataccgctatcgacagcgacaaagtggcggaaaaaattgccgacgaagcgcgcgatgatacgccgcaggcgctggatgctgtctgggaagaagagcaggttaaattctttgctgacaaaggctgcggtgatagtgcaatcactgcgcatcagcgtcgctttgccggtgccgtcgcgccgcaatatctgaatatcaccaccggaggacagcactaatgcaattcctgaatatgttcttctttgatatctacccgtacatagccggggcggtcttcctgattggtagctggctgcgttatgactacgggcagtacacctggcgcgcggcgtccagccagatgctggatcgcaaagggatgaacctggcgagcaacctgttccatatcgggattctggggatttttgtcggtcacttcttcggtatgctgacgccgcactggatgtatgaagcctggctgccgattgaagtgaaacagaaaatggcaatgtttgctggtggtgccagcggcgtgctgtgtctgattggcggcgtgctgttgctgaaacgtcgtctgttcagcccacgcgtgcgtgcaaccactaccggagcggatatcctgatcctgagcctgctcgttatccagtgcgcgctgggcctgttgaccattccgttctccgctcagcatatggacggtagcgagatgatgaaactggttggctgggcgcagagcgtggtgaccttccacggtggcgcttctcaacacctcgatggtgtggcgtttatcttccgtctgcacctggtgctggggatgacgttattcctgctgttcccgttcagccgtctgatacacatctggagcgtaccggtggagtatctgacacgtaagtaccagctggtgcgcgctcgtcactaagcgaattttagttcacatagaccctgcttcggcggggtttttttatgggcacggtgcggggtgagttgtcggatgcgcttcgcttatccgacctacaggggaggatattgtaggcccggtaaacgtggtgccatcgggcaaaattagctcggagtaacaggttttgattatttaaggaagcgatggtggtgggggaaggattactcagcgctgcgcgcttcgcccttcgggtcgttgcctgcggcaacgctctcagcctggcgctcaagagcaaccttggtcgaagcttcagttccttccccgcttgggcagaatatttgattgcggatagctttgagaattccggggcttttgaaagtgatggtggtgggggaaggattactcagcgctgcgcgcttcgccctagcggtcgttgcctgcggcaacgctctctcgctgacgctcgagccgaaccttaatcgaagcttctcatccttccccgcatgggcagaatatttgattgcggattcgcttgagagttcagggacttttgaaagtgatggtggtgggggaaggattactcagcgctgcgcgcttcgcccttcgggtcgttgcctgcggcaacgctctctcgctggcgctcgagtgctaccttggtcgaagcttctcatccttccccgcatgggcagaatatttaattgcggattcgttgggaagttcagggacttttgaaagtgatggtggtgggggaaggattcgaaccttcgaagtcgatgacggcagatttacagtctgctccctttggccgctcgggaaccccaccaggggtaattcaaattttgaggtaatgcttgagatggtggtgggggaaggattattcgtcgcttcgctcctcacccttcgggccgttgcctgtggcaacgttctctcgctttcgctcgaatcgaaccttagtcgaaggttctcacccttccccgatgagtgcaaactttcacaatctcaccgaagttaccacatcgctgtggtgaattatggtggtgggggaaggattcgaaccttcgaagtcgatgacggcagatttacagtctgctccctttggccgctcgggaaccccaccacggggtaatgctttttactggcctgctcccttatcgggaagcggggcgcatcatatcaaatgacgcgccgctgtaaagtgttacgttgagaaaaatgaactggttgcgtaattttcatccgtaacggattaaaggtaaccagttatttttgctggcgattaaagaataatcgttcgattaccgtaaacaaagacgcgctgtgccagtactttgtatagtgcacgacttaagacgtttttctcgacgtcacgacctgcgcgcatcatatcttcagctgtgtaggtatgatcgacatgaataacgtcctgcatgatgattgggccttcgtccagattgtcattcacatagtgagcggttgcgccaataatcttcacaccacgttcataggcctggtgataaggacgtgcgccaataaacgctggcaggaaactatggtgaatattgatgatcttattcgggaagcgtgccacaaattccggcgttaatacccgcatatacttcgccagcaccacgtagtcaggttgataagcatcaatggcatccgccatcttttgatcgtgctcgttgcgggttaacccttcatggcttaccagctcaaacggaatatcaaaacgctcaaccagagaacgtaaagtatcgtggttaccaataactgccgcgatttcgacatccaggccgccgtaattggctttcatcaacaaatcgccaaggcaatgcgcttctttagtgaccagaatcactatccggcgacgaccggcaggattcagctcacgcacggagccttctggcaatgcgctatcgagatccgccagcagggtggaatcattaaaaatcccttccagttccgtgcgcataaaaaagcgcccggtacggtgatcaacaaattcattgttctgtacgatatttaactcgtgcttgtagcaaatattggtaatacgtgcgatcagacctttttggtccggacaaatagtacgcagaactttacgttggagactatgcattgctggaaaaaccttgttgagagtgtttgctaaaccgtaccgtcaaccattattggccgcagcactttttaaattttttaccactaccacaagggcagggatcgttgcgaccaaactgcggacgtgtaccgtcaatatagtaccattgaccgttttctttcaaaaatcggctacgttcaattattgcacctgttttaccaccttcggtaaatcgagcaacaaaactgacaaatccgatattgtcggcgtcctgccaacaatgttcaaatacggtcaatcccaaccattcagtatgcgcaaatccggccatcaattcggcacgtaacgccgctgctccacaagagggatgccaggtctttattaaataatctgcgtcttgcatcacaaaagcgcagtaacggctacgcatgagatgttctggatcaggtgcaaccttttcaccagacacataagggtggcaacataggctatactcgacagcactaccacagggacaaagctgagacacaaataatctccctggaaacaataacggcgtattaaccgcctgagtagcactatgttaaccgagcagtagcgatgtggctacgattgcattccaggggaatcttgcgggaataatgagaaagataaaaatagggctggcgctgggatctggcgcggcgagaggttggagccatattggcgttattaatgcgctaaaaaaagtgggtattgaaattgatatcgttgcaggatgtagtattggtagcctggtgggcgctgcctatgcatgcgatcgattatctgcgctggaagattgggtgacctctttcagttattgggatgttttacgcctgatggatctctcctggcagcgcggtgggttactgcgcggcgagcgtgtcttcaatcaataccgcgaaataatgccggaaacagagatcgaaaattgttcccgtcgctttgcggctgttgccaccaatttaagtacgggacgtgaattatggtttactgaaggcgatctccatcttgctattcgcgcaagttgcagtattccaggactcatggcacctgttgcacataacggctactggctggttgatggagcagtcgttaacccaattcctatttccctcacgcgtgcattgggggctgatattgtgatagcggttgacctgcagcacgatgctcatttgatgcaacaagatttgctctcctttaatgtcagtgaagaaaatagcgagaatggtgattctctgccgtggcatgcgcgtctgaaagaaaggttaggcagcataacgacacgtcgggcggtgacagcgccaacggcaacagagattatgaccacttctatccaggtgctggagaaccgccttaaaaggaaccgcatggcaggtgatccgcccgatattctgattcaacctgtttgcccgcaaatatctacgcttgatttccatcgcgcgcacgctgccattgcggccggacagctggcagtggaaaggaaaatggacgaacttttgccgttggtacgcaccaacatttgaccagaatttttatctacacttaagttaattctgacaggcgcaggtggcaatagcatgccactattgagtaaagccagtcaggggagagaacatgacgcagccattggtcggaaaacagattctcattgttgaagatgagcaggtatttcgcagccttctggatagttggttttccagtttgggagcgacaacggtactggcggctgatggggtggatgcccttgagttgctgggaggtttcactccagacctgatgatatgtgatatcgcgatgccacgaatgaacgggcttaaactgctggagcatatacgtaacagaggcgaccagaccccagttctggtgatatctgccactgaaaatatggcagatattgccaaagcgttacgtctgggcgttgaagatgttttgctgaaaccagttaaagatctgaatcgcttgcgcgagatggtttttgcctgtctctatcccagcatgtttaatagccgcgttgaggaagaggaaaggctttttcgcgactgggatgcaatggttgataaccctgccgcagcggcgaaattattacaggaactacaaccgccggttcagcaggtgatttcccattgccgggttaattatcgtcaattggttgccgcggacaaacccggcctggtgcttgatattgccgcacttagcgaaaacgatctggcattttattgccttgatgtcacccgagctggacataatggcgtacttgctgccttgttattacgcgcattgtttaacggattattacaggaacagcttgcacaccaaaatcaacggttgccagagttgggcgcgttattgaagcaggtaaaccatttacttcgtcaggccaatctgccggggcagtttccgctattagttggctattatcatcgcgaactgaaaaatctcattctggtttctgcgggtctgaatgcgacgttaaataccggcgaacaccaggtgcaaatcagtaatggtgttccgttaggcactttaggtaacgcttatttgaatcaattgagccagcgatgcgatgcctggcaatgccaaatatggggaaccggtggtcgactgcgcttgatgttgtctgcagaatgagcaaacgataacgcgggctaaatttgcattacctgctaatgtcggctggtggtactatcgtcgccattcgtataagtaattgtcttaattatgctaactcgcctccttttcagaacttagccccttcggggtgctgatatactgggatgcgatacagaaatatgaacacgttcaaaacacgaacagtccaggagaatttaaatggctgccattaatacgaaagtcaaaaaagccgttatccccgttgcgggattaggaaccaggatgttgccggcgacgaaagccatcccgaaagagatgctgccacttgtcgataagccattaattcaatacgtcgtgaatgaatgtattgcggctggcattactgaaattgtgctggttacacacagttctaaaaactctattgaaaaccactttgataccagttttgaactggaagcaatgctggaaaaacgtgtaaaacgtcaactgcttgatgaagtgcagtctatttgtccaccgcacgtgactattatgcaagttcgtcagggtctggcgaaaggcctgggacacgcggtattgtgtgctcacccggtagtgggtgatgaaccggtagctgttattttgcctgatgttattctggatgaatatgaatccgatttgagtcaggataacctggcagagatgatccgccgctttgatgaaacgggtcatagccagatcatggttgaaccggttgctgatgtgaccgcatatggcgttgtggattgcaaaggcgttgaattagcgccgggtgaaagcgtaccgatggttggtgtggtagaaaaaccgaaagcggatgttgcgccgtctaatctcgctattgtgggtcgttacgtacttagcgcggatatttggccgttgctggcaaaaacccctccgggagctggtgatgaaattcagctcaccgacgcaattgatatgctgatcgaaaaagaaacggtggaagcctatcatatgaaagggaagagccatgactgcggtaataaattaggttacatgcaggccttcgttgaatacggtattcgtcataacacccttggcacggaatttaaagcctggcttgaagaagagatgggcattaagaagtaacatccgtatcggtgttatccacgaaacggcgttgagcaatcgacgccgtttttttatagcttattcttattaaattgtcttaaaccggacaataaaaaatcccgccgctggcgggattttaagcaagtgcaatctacaaaagattattgcttgatcaggaaatcgtcgagggatttaccttgctcatccattgcttttttgattacagctggagtacggccttggccagtccaggttttagtttcgccgttttcgtcaacgtagctatattttgccggacgctgagcacgtttagctttggtgccagatttaacggcagcaaggctattcagcagttcgttcgggtcaataccgtcagcgatcagcatttcgcgatattgctgcagtttacgagtgcgctcttcaacttcagcagcagccgcgctttcttcttcgcgacgttcgttaacaacaacttctaatttttccagcatttcttccagcgtttcaagtgtacattctcttgcctgcgcacgaagagtacggatgttgttcagaattttaagtgcttcgctcattgtagtaatctcaaacttatattggggtggtttgttgaggtaataatagagccttaaattcagttgtgcaatagccaggaatgtaaggaattcaaaattgttctttattttgtgccgccaataaatatcttttcataaaattagccagaaaagacgcggcatatagccctatttacaccgatgatttcgcagcacgtgaggttaaaacttcctgattcatgtcacattttatggggagattatcgtaggctgacgacctttcagtcttctgtattagttgtgtttacgagaattccctattaagcgaatgatgaaaagtagaacagtcgcaataagagcatggacttagtattgcactatctcctggaggtcaacagagggctattacttgcgcaacaggttaaagattgtgaatagttaccagcagtcatttacccgcttataacaagcgaggcagttgtaatgatagctcagaaggattatgcaaggcttcgtaagggagaacgcatatacccacttctgtgcatactgttgagctgaaaaactgacgaattatgataaactccagccaactttatttcatatcattgagggcctgtggctgatggcacagctatatttctactattccgcaatgaatgcgggtaagtctacagcattgttgcaatctagttacaattaccaggaacgcggcatgcgcactgtcgtatatacggcagaaattgatgatcgctttggtgccgggaaagtcagtagccgtataggtttgagtagccctgcaaaattatttaaccaaaatagtagtttatttgatgagattcgtgcggaacatgaacagcaggcaattcattgcgtactggttgatgaatgccagtttttaaccagacaacaagtatatgaattaagcgaggttgtcgatcaactcgatatacccgtactttgttatggtttacgtaccgattttcgaggtgaattatttattggcagccaatacttactggcatggtccgacaaactggttgaattaaaaaccatctgtttttgtggccgtaaagcaagcatggtgctgcgtcttgatcaagcaggcagaccttataacgaaggtgagcaggtggtaattggtggtaatgaacgatacgtttctgtatgccgtaaacactataaagaggcgttacaagtcgacagtttaacggctattcaggaaaggcatcgccacgattaataagaatttctttactgacagggtgagcagggcacttttatcctgtcagttcgttttacgcacttcttccgggctatatacccttctcggcagttttttaacgccgctatacgcctcacagggctcttaagcaccgacgttgacttgtgacctgtaaagtacaatatccctgtgtttaggcgttatacatcgtcgcaaatatgatgaaggctaatgctgtcggtttatggaaaagttgctttgggtaaacaaaaaatacggccccagaagggcaatgccgttcacttaagaggagcggcactatgtttcacaggataacgggtttttgatatcttaaccgacctcggccttgatggtcgggggcgttttgttatgaacaccacttccagagcaccccgaagatgctccagtcgtttcgggatggtccctggtgacgccgtgtttcccagctctatcatttctgatgcgatattcttccacgcaggcagtagccagtggcggttacaacccttctggttcagcgtcagcagcaggtcttcgctgtaaaaaagtttatcaaacaacgtaatagagttatccgggatggtggcgagcatggagtgggccagcacagtttcgctctgccggtaaggtgcggtcacggcattcagcagaatgtgacttcccaggttcattaaggccaccagacgcataaccgggtaggcgttctgccgcttagtggatgtgttggcagacccataatattcacgcagctcgggtttatcaggtgtcctgaactgtgcgccatcaatggcaaaaagttgcaggccgtgccagtcatccttcaggtaacgttccgcgcccctgtctgtgcggtctggcggaagagccattccactggggcggcccccacgcgctgacgcgcctgggtgacagcgctgcgggccagcaggttcatccccgcttcgccatccgcgctcaggttcagacggcgaacaacatcggtaattggctcattgcaccaccatccagataaccatgtcccccggtaaacgacggcggcgaacggtcgcatgagcagaaagcgtcaggcagtgttgtatccactcggtgggaaggtgttctgcaaatagttgtgcagagggcggaggcataagcggatggtcactgaaatcgagcagatcattgagaagtggcataagaaaacggctccctgttgtggaagccgttatagtgcctcagtttaaggatcggtcaactaatccttaactgatcggcattgcccagaaggggccgtttatgttgccagacagcgctactgattaagcggattttttcgcttttttctcagctttagccggagcagcttctttcttcgctgcagtttcaccttctacataatcacgaccgtagtaggtatccagcagaatctgtttcagctcggagatcagcgggtaacgcgggttagcgccggtgcactggtcatcgaatgcatcttcagacagtttatccacgttcgccaggaagtctgcttcctgaacgccagcttcacggatagatttcggaatacccagttcagctttcagcgtttccagccatgccagcagtttctcgatcttagcagcagtacggtcgcccggtgcgctcagacccaagtggtcggcaatttcagcataacgacggcgagcctgcggacggtcatactggctgaatgcagtctgcttggtcgggttgtcgttcgcattgtagcgaataacgttacaaatcagcagggcgtttgccagaccgtgcggaatatggaactgggaacccagtttgtgcgccatactgtgacatacacccaggaaggcgttcgcaaacgcgatacccgcgatagtcgctgcactgtgaacacgttcacgcgctaccggatttttagacccttcgtggtaggacgctggcagatattctttcagcagtttcagtgcctgcagagcctgaccatcagagaactcagatgccagtacagaaacataagcttccatggcgtgagttactgcgtccagaccaccgaaagcacacagggacttcggcatgtccataaccaggttggcgtcgacaatcgccatatccggagtcagcgcatagtctgccagcggatatttctgaccagtagcgtcgtcagttacaaccgcaaacggagtgacttcagaacctgtaccagaagtggtggtgacagcgatcattttcgctttcacgcccattttcgggaacttgtagatacgtttacggatatccataaagcgcagcgccagctcttcgaagtgagtttccggatgttcgtacataacccacatgatcttcgcggcgtccatcggggaaccaccacccagcgcgataatcacgtctggtttgaaggagtttgccagttctgcacctttacgaacgatgctcagggtcgggtccgcttctacttcgaagaagacttcagtttcaacgcctgctgctttcagtacggaagtgatctgatcagcataaccattgttgaacaggaagcggtcagtcacgatgagcgcacgtttgtggccatcagtaatcacttcatccagcgcgattggcagggagccacggcggaagtagatagatttcggaagtttgtgccacaacatgttttcagctcgcttagcaacggttttcttgttgatcaggtgtttcggaccaacgttttcagagatggagttaccaccccaagaaccacaacccagagtcagggaaggtgcgagtttgaagttatacaggtcaccgataccaccctgagacgctggggtgttaatcaggatacgcgccgttttcattttctgaccgaagtaagaaacgcgagccggttggttatcctggtcagtgtacaggcaagaggtatgaccgataccgcccatagcaaccagtttctctgctttttctaccgcgtcttcgaaatctttagcgcggtacattgccagagtcggggacagtttttcatgtgcgaacggttcgctttcatcaacaacggtcacttcaccgatcagaatcttggtgttttctggtacagagaagcctgccagttcagcaattttataggctggctgaccaacgatagccgcgttcagcgcaccgtttttcaggataacatcctgaacagctttcagctctttaccctgcaacagatagccgccgtgggttgcaaaacgttcacgtacagcgtcataaacagagtcaacaacaacaacagactgttcagaagcacagattacgccgttgtcgaaggttttggacatcagtacagatgcaactgcacgtttgatatcagcagtttcatcgataacaactggagtgttgcccgcgcctacaccgatagctggtttaccggagctgtatgcggctttaaccatgcccggaccaccagtcgcgaggatcaggttgatgtctgggtggtgcatcagtgcgttagacagttcaacagaaggttgatcgatccagccgatcagatctttcggagcaccggcagcgatagcagcctgcagaacgatatcagccgctttgttggtggcatcttttgcacgcgggtgcggggagaagataatggcgttacgggtcttcagactgatcaggcttttgaagatagcagtactagtcgggttagtggtcggaacgataccgcaaataataccgattggttcagcgatagtgatggtaccaaaagtgtcgtcttcagacagaacaccacaggttttttcatctttataggcgttgtagatatattcagaagcaaagtggtttttgatcactttatcttcgacgatacccatgccggattcggcaacggccattttcgcgagtgggattcgagcatctgcagcagccagagcggcggcgcggaagattttgtctacttgctcttgagtgaaactggcatattcacgctgggctttttttacacgctctacgagtgcgttaagttcagcgacattagtaacagccataatgctctcctgataatgttaaacttttttagtaaatcatctgctcgaatacgagagtatagtcagtgcggtgatgatttgcttaacctatgaaaatcaaaagcttactcgcgctcacactcactgtgatttactaaaagagtttaaacattagagttattatctctaatgcgtcacttccaggtggcgtaagcaagattactcacttctgggtactgattacgtgatccaaatcaaatttttgcaaagctgacacctttcagcatcgcttttcgccattatagctaacagttaataaattgtagtatgatttggtggctacattagcatgttttgcacaactagataacaataacgaatgatagcaattttaagtagttaggaggtgaaaaatgctgtcaaaaggcgtattgtcagcgcgtcttttcaaccttatttatggctaacattatccggcttttgcttcggagctaaccgtgattcagaccttttttgattttcccgtttacttcaaatttttcatcgggttatttgcgctggtcaacccggtagggattattcccgtctttatcagcatgaccagttatcagacagcggcagcgcgaaacaaaactaaccttacagccaacctgtctgtggccattatcttgtggatcagcctttttctcggcgacacgattctacaactttttggtataagtattgatagcttccgtatcgccgggggtatcctggtggtgacaatagcgatgagcatgatcagcggcaagcttggcgaggataaacagaacaagcaagaaaaaagtgaaaccgcggtacgtgaaagcattggtgtggtgccactggcgttgccgttgatggcggggccaggggcgatcagttctaccatcgtctggggtacgcgttatcacagcattagctatctgtttggtttctttgtggctattgcattgttcgctttatgttgttggggattgttccgcatggcaccgtggctggtacgggttttacgccagaccggcatcaacgtgattacgcgtattatggggctattgctgatggcattggggattgaatttatcgttactggtattaaggggattttccccggcctgcttaattaattcctttcaaatgaaacggagctgccatgctccgtttacttcgtcattatttttactttgttcccgcgcagttatcaaaagcaaaaggaataggtaaaaatattcttctcaaattacagttagttataaggatttccttaactgcttctcctcaccatcatgttattttcgccacatcataatcctgggcttgctgaagaataattgaaatgatattattaattccactgcctttggtagaggaaagtgctaaataataatcaattgttaaattattgtgcatttcactactggaactgtaatcagaaaagatagacatgcttagccaatctctatttgattgaattgaaagatgtttgttaaggcatggatgcaagctatagattctgatacggtcaataaaagagaattgcttaacaattttgcaaaatgtattggcgagtaagaaccgcatttggtactttccgggcaaccgccagacgattctttattggtaatgagaataattaacaattaaagagcgtcgcgaaagaataatgtgtctcgacaggggagacacagtacgaatcgacataaggtgatcgtctgaatcaccagaataaataaagtcggtgatagtaatacgtaacgataaagtaacctgacagcagaaagtctccgagcctgtgcagggtcccaatccgggattacacatgctggttaataccagtaattataatgagggagtccaaaaaacaatgaccaacatcaccaagagaagtttagtagcagctggcgttctggctgcgctaatggcagggaatgtcgcgctggcagctgatgtacccgcaggcgtcacactggcggaaaaacaaacactggtacgtaacaatggtagtgaagttcagagtttagatccgcacaaaattgaaggtgttccggagtctaatatcagccgagacctgtttgaaggcttactggtcagcgatcttgacggtcatccagcacctggcgtcgctgaatcctgggataataaagacgcgaaagtctggaccttccatttgcgtaaagatgcgaaatggtctgatggcacgccagtcacagcacaagactttgtgtatagctggcaacgttctgttgatccgaacactgcttctccgtatgccagttatctgcaatatgggcatatcgccggtattgatgaaattcttgaagggaaaaaaccgattaccgatctcggcgtgaaagctattgatgatcacacattagaagtcaccttaagtgaacccgttccgtacttctataaattacttgttcacccaagtactagtccggtgccaaaagccgctatcgagaaattcggcgaaaaatggacccagcctggtaatatcgtcaccaacggtgcctataccttaaaagattgggtcgtaaacgaacgaatcgttcttgaacgcagcccgacctactggaacaacgcgaaaaccgttattaaccaggtaacctatttgcctattgcttctgaagttaccgatgtcaaccgctaccgtagtggtgaaatcgacatgacgaataacagcatgccgatcgaattgttccagaagctgaaaaaagagatcccggacgaagttcacgttgatccatacctgtgcacttactattacgaaattaacaaccagaaaccgccattcaacgatgtgcgtgtgcgtaccgcactgaaactaggtatggaccgcgatatcattgttaataaagtgaaagcgcagggcaacatgcccgcctatggttacactccaccgtatactgatggcgcaaaattgactcagccagaatggtttggctggagccaggaaaaacgtaacgaagaagcgaaaaaactgctggctgaagcgggttataccgcagacaaaccgttgaccatcaacctgttgtataacacctccgatctgcataaaaagctggcgattgctgcctctagtttgtggaagaaaaacattggtgtaaacgtcaaactggttaaccaggagtggaaaacgttcctcgacacccgtcaccagggtacttttgatgtggcccgtgcaggctggtgtgctgactacaacgaaccaacttccttcctgaacaccatgcttagcaacagcagcatgaataccgcgcattataagagcccggcctttgacagcattatggcggaaacgctgaaagtgactgacgaggcgcagcgcacagctctgtacactaaagcagaacaacagctggataaggatagcgccattgttcctgtttattactacgtgaatgcgcgtctggtgaaaccgtgggttggtggctataccggcaaagatccgctggataatacctatacccggaatatgtacattgtgaagcactaatggcaatacgtggggcaggagtgtcctgctccacggtgtctgatttttatcgcattacagaaggcacaggccagaaggtagggcaatgttaaaatttattctacgtcgctgtctggaagcgattccgatgctatttattcttattactattagcttctttatgatgcgcctcgcgccgggaagcccttttaccggcgaacgtactttaccgccagaagtgatggccaatatcgaagcgaaatatcatcttaatgatccgatcatgacacagtatttcagctacctgaaacaactggcgcacggtgatttcggtccaagctttaaatataaagattatagcgtcaatgacttggttgcatccagttttcccgtttctgccaaactgggagccgcagcatttttccttgcggtaatactgggtgttagtgctggcgttattgccgcattaaaacaaaacaccaaatgggactataccgtgatggggctggcaatgaccggggttgttatccccagttttgtggttgcaccattattagtcatgatatttgcgatcattttgcattggctgccgggcggtggctggaatggtggggcgcttaaattcatgatattgccgatggtggcgttgagtctcgcttatatcgccagtattgcgcgtattacccgtggctctatgattgaagtattacactccaattttattcgtactgcccgggcgaaagggttacctatgcggcggatcattttacgtcacgcattaaaacctgctctgttacccgtgctctcttatatgggccccgcatttgtcggcattattaccggttctatggttatcgaaaccatttatggtttgccggggattggacaactgttcgttaatggcgcattgaaccgtgactattccttagtgttaagcctgaccatcctggttggtgctttaaccattttgtttaatgccattgtcgatgtgctatatgcggttatcgacccgaaaatccgttactgatactggagctcgcgatgatgttaagtaagaaaaacagcgagacgctggaaaatttcagtgaaaagctggaggtcgaagggcgcagcttgtggcaggacgcacgtcgacgttttatgcataaccgtgcggcggttgccagtctgatagtgctggtgctgatcgcgttatttgtaatcctggcaccgatgctttcccagtttgcctatgacgatactgactgggcgatgatgtccagcgccccggatatggagtccggtcactactttggtactgacagttccggtcgcgacctgcttgtgcgcgttgcgattggcgggcgtatcagtctcatggtcggtgttgctgcggcactggtggctgtggtcgtcgggacactttatggtagcctttccggttatctgggcggtaaagtggatagcgtaatgatgcgtctgctggaaatcctcaactccttcccattcatgttcttcgtcattttgctggtgacctttttcggtcaaaacatcctgctgattttcgtggcgataggcatggtttcctggctggatatggctcgtattgtgcgtgggcaaaccctgagtctgaagcgcaaagagtttattgaggcggcacaagttggcggtgtaagcacaagcggcattgttattcgccacattgtgccgaatgtactcggtgtggtggtggtctacgcaagtcttctggtgcccagcatgatcctctttgaatctttccttagcttcctggggttgggtacgcaagagccgttaagcagctggggtgcattgctgagtgatggcgcgaacagcatggaagtctctccatggttattgttgttcccagcgggattcctcgtggtgacgctgttttgtttcaactttatcggcgatggcttgcgtgatgccctcgacccgaaagatcgttaaggagtgcagccatgagcgtaattgaaactgcaactgtgccgctcgcacaacaacaggctgacgcactgctgaacgtgaaagatttgcgtgtcacctttagtaccccggacggcgacgtcacggcggtcaatgatttgaatttttccctacgtgccggagaaacgctgggtattgtaggtgagtctggtagcggtaaaagccaaactgcatttgcgttgatgggcctgttggctgccaacggacgtattggcggaagcgcaaccttcaatgggcgtgaaatcctcaatttgccagagcatgaactcaataaactgcgcgctgaacaaatcagtatgatttttcaggacccaatgactagcttgaatccctatatgcgcgtcggtgagcagttgatggaagtgctgatgctgcataagaacatgagcaaagctgaggcgtttgaagagagcgtgcggatgctcgatgcggtaaaaatgccggaagcgcgtaaacgcatgaaaatgtacccgcacgaattttctggcggcatgcgtcagcgagtcatgattgcgatggccttgttatgtcgacctaagctgctgattgcggatgaaccaacaactgcgctggacgtcaccgtacaggcgcagatcatgacgctattaaatgaactgaagcgggaatttaataccgccatcattatgatcacccacgatcttgtcgtggtggcggggatctgcgacaaagtgctggtaatgtacgccgggcgcacgatggaatatggcaacgcgcgcgatgtcttttatcaacccgttcatccttattctatcggtttgctcaacgcggtgccgcgtctcgatgcggaaggtgaaacaatgttgaccatcccgggtaatccgccaaacctgctgcgattaccgaaaggttgcccgttccagccacgttgtccgcatgcgatggaaatttgtagtagcgcaccgccgctggaagagtttacgcctggccgtctgcgtgcttgctttaaaccggtggaggaactgttatgaatgctgtaactgaaggaagaaaagtcctccttgaaatcgccgatcttaaagtgcactttgaaatcaaagatggcaaacagtggttctggcaaccgccgaaaacgctcaaagccgtcgatggtgtcactcttcgcctgtatgaaggggaaacattaggtgtggtaggggaaagcggatgcggtaagtccacctttgctcgcgccatcatcggtttggtcaaggcgaccgacggtcatgttgcctggttaggtaaagagttgctgggcatgaaacccgatgaatggcgtgccgttcgcagtgatattcagatgattttccaggatccgttggcaagcctaaacccgcgtatgaccatcggcgagatcatcgctgaaccactgcgtacttatcatccgaaaatgagtcgccaggaagttcgcgagcgcgtgaaggcgatgatgctgaaagtcgggttattgcctaacctgattaaccgctatccgcatgagttctctggtgggcagtgccagcgtatcgggattgcgcgtgctcttattcttgaaccgaagctgattatctgtgatgagccggtgagcgcgctggacgtgagtattcaggcacaggtggtcaacctgctccagcaattgcaacgtgagatgggattgagtttaatttttatcgctcatgacctggccgtggtaaaacacatttccgatcgtgtgttggtgatgtatctcggccatgcggtagaactggggacctatgatgaggtctaccacaatccactacatccttacaccagggcattgatgagcgcagtccccatacctgatccggatctggagaagaacaaaaccatccagttactggaaggggaattaccgagcccgatcaacccgccttccggttgtgttttccgtacccgttgcccgattgccggtccagagtgcgccaaaacacgtcctgttctggaggggagtttcagacactccgtttcttgcctgaaagtcgatccgctttaaaaacaataagggctgacagttgtcagccctttttcacgctaaaagcgattatttattcccgccagatgatatggcaaagtttgtgatctttttcgcggcataacagaatgcgggcaaaaacatcgttgatttcaccatcttcactgtccgccagaccaatcaccacttcggcaaaaaagtccgggttcaaatcgaaatcaacatgttcctgccagtcttccgccggatcgaataactccgcgccgccgcgctcttcaaactgaagattgaacagcaggacatcagctggatcgagattgtcggcagccagttcgagaaaaatatcgtaggcctgttcaagcgtttcatcttcagtcaggcgattgtttagatccatatccatagttactacctgtttaacctctgttggcgacgttttacagcaacggactgaagaagtaaaacagtcgctcggcgacacgttgccataatggacgttttagccataaacgggcatcgagcagacgactacggctaatataatcgtcctgaacggcggcgaggtcagcaccaaaacctttatcgtcgattgccagggtaatctcgaaatttagccacagactacgcatatcaaggttaactgtgccaaccagacttagttcgccatcgaccagcacgctcttggtatgcagtaacccgccttcaaactgataaattttaaccccagcagccagcagttccgtaaagaatgcgcgactggcccagccgaccagcatgctgtcattttttcgcggaaggataatactgacatccaccccgcgctgcgccgccgtgcaaatcgcatgaagtaaatcatcgcttggcacaaagtagggcgtggtcatgatcaaatattcacgcgcgctataagccgcagtcaataatgcctggtgaatgagatcttccggaaagccggggccagaagcaattgtgtgaatggtgtgaccgctggcctgttcaaacggcataatattgacatctggtggtggcggcagaatacgttttccggtttcaatctcccagtcgcaggaataaataatccccatcgcggtggcgatagggccttccatacgcgccatcagatcaatccattgccctacgcccgcatcttgtttgaagtagcgaggatcgaccatattcatgctgccggtgtacgcgatgtaattatcgatcatgatcatcttgcgatgttggcgcaggtccatacggcgtaaaaacacacgcatcagattgacctttaaggcttcgaccacttcaataccggcattacgcattagctcgggccacgggctgcggaaaaaagccacactcccggcggagtcgagcatcaatcggcaatgaatgccgcgtcgcgcagccgccattaaactttcagccacctggtccgccatgccgccgggctgccagatataaaacaccatctcaatattatggcgcgcgagctggatgtcgcggattaacgcctgcatcacatcatcactctcggtcatcagttgtagctgattccctttgaccccagcgatcccctgacgacgctcgcaaagcttgaataatggcgcagcgacactgctattttcttcggcgaagatatgcttacaggctttaaggtcgttaagccattttgcggtggaaggccacatcgctctggcgcgctcagcgcggcgtttgcctaaatggagctcgccaacggcaagataggcaataattccgactaacggcagaatgtaaataatcaacagccaggccatcgcggagggaactgcgcgtcgtttcattagaatgcgtaaagttacgcctgcaatgagcaaccagtatcccagaatggccaaccaactcaccaacgtataaacggttgtcatagattagaaatccttttgaaagcgcattgttatgagtttacgcatatggattcatctggcaaataaaaacgcgggaaaagcactggtcagcgtcgggggtgggggtataatgaccattctgttattgcatagagtagttaacatgaagcggagtagaacggaagtggggcactggcgcatgcagcgtcaggctagccgacgtaaatcgcgttggcttgaggggcaatcgcgccgaaatatgcgtatccacagcatcaggaagtgcattctaaacaaacagcgtaactcgttattgtttgcgatctacaatatctaaatgtactgggcaccattgcggtgcccaataagtttactcttccgtctttaaactttatttttgcgcgctttctttactgtcagctttcgtttctagttcatcgttatcgctgaaaataccatgaccactgttcaacaacatactaacgagcatatcattattaatctcttcaccatttaaaactcgcgccagaatttcgctgccaaacagttgcggactgagaatgatatccggatgtaccatcttaatcttattcaggtttttgctatcactgacggcgagaactgttttgacatcactgctcatatcttttgcgctgagtacaacaaacgcgttatctgcatcgttatcactcagcgccagaatggcccggcaacgatcgattcccgctttctttaatacagaactgtcattactgtcaccggggataacatcagcattatcgcctaagcgttgctcaagttgcttgatatcatcttcaggcaagttgctgataaccgttacgttttgtccgcgttgattcagttgcaggatcgtattgatggcgagaatgctatgtccgcaaacaataaaatgatctttacgatgcattgtatgattgtttccttttacaagtttgttgaatcccccgcggataagcggaccaaaaatactggtcatagatgtggcaaaaacggtaatgccggaaataatgacgctaatagtgaacaatcgtgcactttcagaaacagggacaatatcgccatagccgacggtactcatggtttctatgctaaaatagaacgcggtcatcaaactttctattcgcggattaaaaccttcgcttaaataaagcgcaccgtaggtactgtaaaacagtaatgtcgtgaaactaataaatgcaaaaattgtcccggctgcggcgctactgtgggagaagtctttgcgcagtatcagcaaaaacaccagcgtaaaaatgcaaaatccaatactaaatttcagccagggataaaaatgcagggtgtaaattagcgctatcaacaacaaaatgatactgattgcccatgcgagctttgcccggaacagtaagccaatggagttcaggacaagaaagacgccgagcataaagagtggggcgtttgccagcaaggagagatccaactcactaaatgctttgatatggaaaatatcaagcaaattgacgctcataccatagattgttttaaaaataagcaatccatttaaaaagacggccagcgcgagaatgtcgtgccgaagggtcacccataaatttgttgctgtttgtttgaatgtagcccagtgactcactgatacctctgtaaccacaattttgtttaattatcttagcgtgcacattttctgaacatacatgcagcgcgtgaatgtgttaaacaatagtagatgactttatccgcagtaatcaaaggatttgagcgagcaactgtacctcaggaaaggtcatttttcctgaatatgctcacatcatataaagaaatacagataaagttattatctgcttgtggtggtgaatgcactgaccggctataaggaaaggccaaacaagaacacggttgcaaaaaccgtgcccttaaatattgaatctctattcagaacactttcttaaatggtttcacactaacgtgttcatagactcctgccgctacgtacgggtcagcatcggcccaggcctgagctgcttccaggctttcaaattcagcaataacggtactgccagtaaatcccgcagcccctggatcgttactgtctaccgctggcattggaccagctgtcaacaaacgaccttcatcatgcagtaactgtaaacgtgctaaatgtgccggacgaacggaaaggcgtttttcgaggctatcagctttgtcttgagcgtaaataacatacaacacgggcacaactccttgttcgggaaagttgtaaagtacgttatttgaaagggcgaagatctgcaacggaaagatgatgtctttgttaaggccatgcataaagtaagggtaattacgccaaaaatgacattttcactgatcctgatcgtcttgccttattgaatatgattgctatttgcatttaaaatcgagacctggtttttctactgaaatgattatgacttcaatgacccttgatttacctcgccgcttcccctggccgacgttacttagcgtctgcattcatggtgctgttgtggcgggtctgctctataccagcgtacatcaggttattgaactacctgcgcctgcgcagccgatttctgtcacgatggttacgcctgctgatctcgaaccgccacaagccgttcagccgccaccggagccggtggtagagccagaaccggaacctgagccgatccccgaaccgccaaaagaagcaccggtggtcattgaaaagccgaagccgaaacctaagccaaaaccgaagccggtgaaaaaggtacaggagcagccaaaacgcgatgtcaaacccgtagagagccgtccggcaagtccgtttgaaaatacggcaccggcacgcctgacaagtagtacagcaacggctgcaaccagcaagccggttaccagtgtggctagtggaccacgcgcattaagccgtaatcagccgcagtatccggcacgagcacaggcattgcgcattgaagggcaggttaaagttaaatttgacgttacgccggatggtcgcgtggataacgtacaaatcctcagtgccaagcctgcgaacatgtttgagcgtgaggtgaaaaatgcgatgcgcagatggcgttatgagccgggtaagccaggcagtgggattgtggtgaatatcctgtttaaaattaacggcaccaccgaaattcagtaagcagaaagtcaaaagcctccgaccggaggcttttgactattactcaacaggtaaggcgcgaggttttccttcaggatcaaccgcgacatacttaaataatgcttctgtcgctttatagcgttgcccaattggttcagacgctacttttttcacccacacttcaatattaatgctgacgcttgtcgtccctttctggacacagcgtgcatagcagcacaccacatcgccgaccgcaaccggccgtaagaaagtcattccttcaacccgcacagtcactacgcgaccgtgggcaatttcttttgccagaatagcgccgccaatatccatttgactcattaaccaaccaccaaagatgtcaccattggcattggtatcggcgggcatggctaaagtacgtaaaacaagatcgccctgagggacgttatgtgttgtagacatggtaaaaccgacttaaaaggaaaatcacaggcgcgatgctactatgattttcctgaggagaacagaggagatacagcgccagccccgaaggactggcagtctggttaggatttatcttcctgcggcatgtggcggtagatatagataccgcttaacaatgtgaagattaaggtaagggcggtcaggccaaagactttaaagttgacccaaatattttgcggcagccagaatgcgatgtagatgtttgccagaccgcaaaggataaagaaaacagcccaggccagattcagcttgctccataccggttgcggcagcgtgagttctttacccagcatccgctgaattagcggctttttcatcacccattggctgactaacagggctcccgcaaatagagcataaatgacagtaaccttccatttaataaactcatcattgtggaagaacagcgtcaagccaccgaagacgaccaccagaacaaaagtgatcagggccatcttctcaaccttacgaaagcgaacccagctatagataagcacaatcgccgtggcgacgatcagcgccgcagtagccgcatagatgtcataaatcttgtaaaacgcgaaaaagacaaccagcggtaaaaaatcaagaaactgcttcattttacgattccgtaatcaaatgcttaaggttattggcgaatcaacatatacaggcggaacagatagatgagcaatatggcactaatcaggttgctcaaggtgttcgccagtacggcaccaatttccggggttaatgcggcaaaagaagaggcaaaaagcagcaacagtgtttttgccagcaaccagctcagtactgcgggtgccaccagacgcatattcgcccaagtcagccgcatactgctacgcatgctggcaaaaacgcccattttgtcctgtaccaacatcaccggtgccagggccagtaaaatggccatgataattcccggaacgaccaccagcatgatgccaatctgtactaaaagggtagtcagaaaaatcagaataaataactttggcaatatcggcgcactggcaccaatagctcgcagcgcactgactctctgacccgcagacaccagctggataattaatattacgcctccggcgagaatggcgttaccgattaatccactaaaagtggacgccgcactagcctgcagcaaaatttgttgctgttccggactcatattctgaaccaggtcgaacaacccactactgccgctaacgggcacgcagtcattgagctgcgcaagctgtgcatcactgggactgaaagcatgccctaacaccactgtgataaacgcacatagcaagcttaccaacagaatggtcataaattgattacggaagaaatttccggtgtcacggtatacggactgcgccgtgatagacatgcactctccttgagttttatgcaggtgttaattagcgggcaattgtaccctggttaagcctcgggtggcagcatcaggtcttgtatggaaaagcatatctttgtaaagcggaggtaattgctggccttcaggcatgggcaaatcgcggcaagtggcgaccgagttaatatttgcgtagcgaaaatatttaaaaattgatttaaatcacattaaccaggattctcaatgcaacttctaaattaatccagatcaataaagggtgaattatcatatgtaatgtgatctatgtaggatcatttgttactccaatgtaggtatattcgtcacgtttttataaccataacgacggagcggatatgaaaaagttaacagtggcggctttggcagtaacaactcttctctctggcagtgcctttgcgcatgaagcaggcgaattttttatgcgtgcaggttctgcaaccgtacgtccaacagaaggtgctggtggtacgttaggaagtctgggtggattcagcgtgaccaataacacgcaactgggccttacgtttacttatatggcgaccgacaacattggtgtggaattactggcagcgacgccgttccgccataaaatcggcacccgggcgaccggcgatattgcaaccgttcatcatctgccaccaacactgatggcgcagtggtattttggtgatgccagcagcaaattccgtccttacgttggggcaggtattaactacaccaccttctttgataatggatttaacgatcatggcaaagaggcagggctttccgatctcagtctgaaagattcctggggagctgccgggcaggtgggggttgattatctgattaaccgtgactggttggttaacatgagtgtgtggtacatggatatcgataccaccgccaattataagctgggcggtgcatagcaacacgatagcgtacgcctcgatccgtgggtgtttatgttcagtgcaggatatcgtttttaattccgcacaaaaacgaccccgtaatatacggggtcaataaggacatggtataaagggtattatttcttcgcttctacgccatcagtttcagagcgaattaaaaatttctcagttgtttgcggaatattctgaatcagccagtcggccatttgcttttcctcatttaaaatcgcttcgatggttggaatactagctgtatcaccggcattttttgctgctgctaatagactggtgtaacaggcgatttcaaattgctcgaagacatatccgctaatagagcctttgactatttcatcagaagggaatataccaccgatactctgcccaagcgcagccattttactcatggaatctttaatgacactacgactaatgtcattacgatcaagaatagtttccagttgaacaatctggtttttggtttcactaagatgttgttcaatacgagcgcgtagttcaggataattatctatacggctggccatggattcaagcatagattcggcttgcttttccattgcgtgggcgtcacgtaaccagtcatgataatgttcaatacgattcatgaaaatgtcctctttataaaatgactaaaagttaaaattcatatttcaggctttattttcggctttcttatttacgttattaatggccagatcagtcagtttgatgtcggtggccttttcttcttccagggtttctttcagaagcttcgctgctttacggtaacctaattgttcagccagcgtcgctaatgtcccgtaactggcaatctcataatgctcgactttctgtgctgcggcaatcagtgcggcatcacgcacttcgtttttctcggtactttcgatgacctcattagcttcttcaataagaccttccattgccacacatttcatgcgcttaattttcaggttgctttcggactccacaacttgatcaatacgttcaatctgtccatgagtttcctcgaggtgcgcatgaaaagcctgacttaatttttcattacttgttgctcttgcgagttttgccagtgcccgggttaattgtttttctgcgctgtaggtatcactaagcaggtgaataaatacatcttcaatggtcttcatattcatatttttctccagtgaaatcactgcgagccatacggcccgcagatgcaattatctttatcagctgatattaataattaacggtgaatcaggatttgccacttttattaccaccgctttgttgaccgccttttttacccgcttcagatgcgcgttgcggatcatttttaaaattaccgccgctatgctgaccgcctttacggcctgcgtcggatgccttctcacggtcttcggcgaaatttccactaccaccacgatgttcggccatgttatttctcccgttgcgttgcattgtttcattaatatgagtgttgtgtgtcgacactcattaaaattagtcgctaatgagaattagtcaaattaagcgcaacgagaagatagagggaaaatatattttgaggaacattctggatatattaacaattacctgaggaataagtgacttagagaaaattattgattttactggtgttatgttgcgggattaatttgtttgattatattactgttgggcggaaaaatgacgtaagttgacgttcgaccggggtaagcgaaacggtaaaaagataaatattaaatgaatttaggatttttccggcttcattaaagaaagttaaaatgccgccagcggaactggcggctgtgggattaactgcgcgtcgccgctttcatcggttgtacaaaaactttcagtgccgccagcattttctctggctcattaatatgttgctcgatgattttaacaatggcgctaccagaaatcgcgcccgcagctcctgcatcaatcgctgcttttacctgatccggggcggaaataccaaatccctgcaatggaggtgcagcgttgtactctttcagcttcgcaaccagatgattgaggggtaacgcggcgcggttttctgcgccggtcacgcctgctcgactcagcaaataggtgtaaccacgaccgtaagaggctatctggcgcagcaggtcgtcatcggcatttggcgggcagatgaagataggtgcgacattatgacgcaacgcggcctggcggaagggcgcggactcttcaactggcacatcggcaaccagcacgctatcgacgccgactttttcgcactgggcataaaactcatcaatgcctttgttaaacaccagattggcatacatcaacaggccaatgggaatggtcgggtgtttctggcgaatcagtgccagcatttcaaaacattgtgccggagtcacacctgccgcaaaggcgcgcagagtggcgttttgaatcgtcgggccatccgccagtgggtcggagaaggggatacctaactccagcgcgtcagcaccggcttcaattagcgtatcgataattttcaaactctgctcaatgcccggatcaccgagcgtgacgaaaggaacgaatgcgccttctttgcgctccttcaactgggcaaacagagattcgtagcgttccatcagatttcccctcgtgctttcaaaatatcgtgaacggtgaagatgtctttatcgccgcgaccggaaaggttaaccaccagtagctgctctttatccgggttttcgcgcatcattttcaacgcatgggccagggcgtgggaggattccagcgccgggatgatcccttcgtgcaggcacagcgttttgaaggcttcaagggcttcatcatcggtaatagacacgtaatcagcgcgtccagtgctgttaagatacgcgtgttgtgggccgacagacgggaaatccagtccggcggagatggagtaagattcttcaatctgcccgtcttcggtttgcatcatcggcgctttcataccgaaatagatacccacgcgaccatgttttagcggtgcgccgtgctcgccagtttcgataccgtgaccacctggctccacaccaatcaggccgacgttggtttcattgatgaaatcagcaaacatgccgatggcattgctaccgccgccaacacaggcgataacggcatccggcaggcgaccttctctttccagaatctgcgctttggtttcttcgccaatcatccgctgaaactcacgcacaatggtcggataaggatgcgggccagctgcggtgcccagcatatagtgcgcggtttcgtaactaccggaccagtcgcgcagcgcctcgttacaggcatctttcagcgtcgcggaaccgctatgcaccgggatcacttccgcacccattaagcgcatacgaaaaacgttagggctctggcgttcaacgtctttggcacccatataaatacggcatttcaggccgagcagggcgctggcaagggcgctcgccacgccatgctgaccggcaccggtttcggcgatgatttcggttttacccatccgcttcgccagcaacgcctgccccagcacctggttagttttatgcgcgccgccgtgcagcaaatcttcacgcttgagatacagcgtggtgttcgtcccggctgtaatgttctggcatttggtcagcgcggttggacgcccggcatagtttttcagcaggtcgttgaactgagcctgaaattcaggatctttttgcgcactgacaaaagcttcttccagctggcgcagagcaggcatcaggatttgtggcacgtacatgccgccaaactcaccaaaataggggttaagtaatgttgtcattgttcctttccttaatatgcgcgcagcgtctggaaaacgctggccaaaagacgtgcgtctttgatgcccggttggctctctacagcagaattaaaatcaagtccggcgcagccggtttgtgccgcttccacgcagttatctgcgcctaagccccccgccagcagaacgttgccaaggctttgaccatttaatagactccagtcaaaacgttgcccgcttccaccctggccgttgtctaaaacatatttatcaacgtgctgaaactcgcgggcgggcagggtttcaccgacgcttaatgctttccagatggcaacatgtgctggcagagcttcacgcagcgtatcgatatacagctgttcttcattaccatgcagttgcactgccgccaggcttaacaccttagctttgtccaccacatcggcaatatcgtgattgcggaacacgccaacatactgcaacggtgccgcagccatcacttcctgcgcctgttcaacgttgacgcaacgcggacttgtcgcaacaaaaatcaacccaccgtaaatcgcgcccgcgtcataagctgctttagcatcttgcccacgcgtcaggccacatactttattctcacccagcaacacccggcgcacggcggcgtgcaaatcgtcatgggccatcaacgcgctaccaatcagaaaaccgttagcgaagtggcttaactcgcgcacctgagcgtaagtattgatgccggattcgctgattaccgtcacgttgtgccccagtttcggcgcaagctcgcgggtacggttgagatcaatgctcaaatcacgcagatcgcggttgttgatgccaacgacctttgctcccaatgcaatggcgcgctcctgttcctcttcattactgacttcggtcagcacccccatctccagactgtgagcgacggcggcaagctggcgatattggtcgtcatccagtacactaagcattaataagcaggcatcggcctggtaatagcgcgccagatagatctggtaagggtcgataatgaagtctttacataaaatcggctgcggggcgatttggctgacgatggggaggaaattaaagctcccctgaaaatatttctcatcagtcagcacgctaattgcgctagcgtaatgtttataaatggcggcaatgcgtgctggatcgaaatcatcacggatcacgcctttactcgggctcgctttcttgcactccagaataaacgccgtgcgcgcaccctgtagcgcatcataaaaatgtcgcgtgctcggctgaacctcattctgaaaactggccagcggttgctgctgtttgcgggcttctacccaaatcgccttgtctgcgacgattttcgctaaaacggtttgcatcatttaccctcgtgccgccagtgcggtgactctgtcgtaagcggaaccactgcgcagtacctcaagaacggtttgcgcattggcttgcagatcttcatggccatgcaggcgcattaacatggcgacgttcgcagcgacggctgcttcatgggcggcgtcgcctttaccttgtaacaaacgtgttaaaatgtcacggttttcttccggtgttccgcctgccagttgctcctggtggtagggtgtcaggccaaagtcttctgcggtgagctgatagcttttaatttcgccgtcatgcagttcggcaacgattgtcggcgcgtgtaaactaacttcatccatcccgccgctgtgcaccaccgccgcgcgttgataccccagcacgcgcaaggtttcggcaatcggcagcaccagttccggactataaacaccaattaacgccagcggcggatgcgccgggttaatcaatggccccagcacattgaacagggtgcgggttttcagttgctggcgaaccggcatcgcgtggcggaatccggtgtgatacttcggcgcaaagaggaaacatacacctaactcatccagcgcctggcggcttttatcggcgttcatatcaagattaataccgaacgccgccagcagatcggagctaccagatttactggagacgctacggttgccgtgtttcgccactttcagcccacaggccgcggcgacaaacgcactggcggtagaaatattgatactgttgctgccgtcaccgccagtaccgacgatatcagcaaacagataatccgggcgcgggaacggcgctgcgttttccagtagcgcggttgctgccccggcgatctcgttcgggtgctcaccgcgaattttcatgctcaccagcgccgccgccagttgttccggcttcagctcgccacgcaccaccgcactaaacagctggtggctttcttgttggctaagcgtctgcgcctgatacagtttttccagaatcggttgcagcgtgttggctggctctagtttctgctgcgcccaggccagcgtttgttccagcaggcgagcgccctgggtggtgagaatggattccggatggaactggaatccacaaacgcgatccgcatcgtgacgtactgccatcaccatgccattaaaatgggcgttgatggttaaaccggccggaatgttactgccaaccaggctgtgataacgcgccaccggcagcgggtttgttaatccggcaaacatcgcctgaccgtcatgttcaatgctggaggctttaccgtggagaatttcgcccgcctgaccgacatagcccccgtaagcttcgacaatcgcctgatgtccgaggcaaatgccaataatgggcagcttgccacgcaagcgggtgaggagttccggcatacaaccggcttcgctcggcacaccggggccaggagaaagcatcagcaccggattgctcatggtcgccaggcgttcaattaaggtttgcgccggaatatggttgcggtaaatcaccacgttatgcccattgctgcgcaactgatctgccaggttgtacgtaaaagagtcgatattatcgagcagcagaatgtcagccatcagaaagtctcctgtgcatgatgcgcggtggcaatagcgcgcagtacagcgcgggctttgttacgggtttcgtcggcttcgctctgcggaacagaatcaaggactacaccagcacccgcttgcacggtggcgataccgttttccaccagcgcgctgcggatcacaatgcaggtgtcgagatcgccatgcgcggtgaaataacctaccgcgccgccgtagctgccgcggcgacgaccttccgcctcggcaattaactgcatagcgcgtactttcggcgcaccgcttaacgtccccatattcatacaggcgcgataagcgtgcagggcgtcaagatcgtgacgcagttcgccgactacgcgagagacgaggtgcatcacataggaataacggtcaactttggtgagatcggcgacgtagcggctgccgggggtgcaaatgcgtgccagatcattacgggcgagatcaaccagcatcagatgttcagacagctctttatgatcggtacgcatttccagttcaatacggctgtcgagatctctgtccagactaccatcggcgcgacgaccgcgtgggcgtgttccggcaatcgggtagatctcaatctggcggctggtggcatcatacttgaggctgctttccgggctcgcgccaaatagggtgaaatcattatcctgcataaaaaacatgtacgggctgggattactctttttcagcacgtaataggccgccagcggactcgggcagggcagagagaaacggcgagatggcaccacctggaaaatttctccagcgcgaatcgctttttgcaacaaacgcactacgccaccgaactcttcatcgctctgattacattcacaacgcatatgcggcacggaaaccactggcagcggcggcgcggcttcggtcagttgctgacgtagttcgttcaggcgagcagtgagacgttgtttttcttcttcattcggagcaaacaggctggcctgaatacgggtgctttttttctgatggtcaatcaccatcagcgtttcagcgagataaaaacagaaatcagggcagttattttccgcactcagttgcggtaaatcttcaaatcccgccacaaggtcataagagaacaggccgccgaagaacatggcttctcgttcttccttcggtacattcaacagattctgcaataaacggaaagcgtcaaaaacgctaagggagcataagcgggcgtcttcatccagcagtggactgacaggggggaagcgcagcacacggcagtttggactttgttcactttccacacccgcaggcagggcgttatccagtagtgccaggagggcttcgccgttgccggaaagtgcctggattgtgacagtgtcacctaaagctgtaatgcgcagcgcactgtctaccagcagcaggctttttaaatcatctttgctgtcgatatctgcggattccagcagcagcgttgccggacgatccccacacaactggtgaaaaagcgcggtgggattgtcgcgataagcgccttcgcaggttagcagttcgagagtcggtttttgtgtttgcattgttattctctaattttgttcaaaaaaaagcccgctcattaggcgggctgggtatctgattgctttacgcatggtgaatacactgcccgtttcaggaagtgcgccaccaacctttcagtacgaaaattgctttcattgtcgataccctttttacgtgaacttgcgtactagttaactagttcgatgattaattgtcaacagctcatttcagaatatttgccagaaccgttatgatgtcggcgcaaaaaacattatccagaacgggagtgcgccttgagcgacacgaattatgcagtgatttacgacctgcacagccataccacagcttccgatggctgcctgacgccagaagcattggtgcaccgtgcagtcgagatgcgcgtcggcaccctggcgatcaccgaccatgacaccacagctgcaatcgcgccagcaagagaggaaattagtcgtagcggactggcgttgaatcttattcccggcgtggaaatttccacggtctgggaaaatcatgaaattcatattgtcgggctgaatattgatattactcatccgctaatgtgtgagttcctcgcgcagcagacagaacggcgcaatcagcgggcgcagctgattgccgaaagacttgaaaaagcgcaaatacctggggcgctggaaggcgcacaacgactggcgcagggcggcgcagtgacgcgcggtcattttgcgcgtttccttgttgagtgcggcaaagccagtagtatggcggatgtctttaaaaagtatctggcgcgcgggaaaaccggatacgttccgccacagtggtgtacaatagaacaagctattgatgtcattcatcattctggcggtaaggcggtgctagctcatcctgggcggtacaatcttagtgctaaatggctgaaaagattggttgcgcattttgccgaacaccacggtgacgcgatggaagtcgcgcagtgccagcaaagccccaatgaacgtacccagctggcggcccttgcgcgtcagcatcatttatgggcaagtcaaggatctgattttcatcagccatgcccgtggatcgaactgggtcgtaaactctggctgcccgcaggcgttgaaggcgtctggcagctatgggaacagccgcagaacaccacagagagggaattatgagccagtttttttatattcatcctgataacccacagcaacgtctgatcaaccaggcggtggagatcgtgcgtaaaggcggggtgattgtttatccaactgattccggctatgcgctcggctgtaaaattgaagataaaaacgcgatggagcgtatttgtcgtattcgccagctgccggacggtcacaactttaccctgatgtgtcgcgatctttctgaactcagcacctatagttttgttgataacgttgcgtttcgtttaatgaaaaacaacacgccgggcaactataccttcatcctgaaggggacgaaggaagtgccacgccgtctgttgcaggaaaaacgcaaaaccatcggtatgcgtgtgccttctaaccctatcgctcaggcgttacttgaagcattgggcgaaccgatgctttccactagcctaatgctgccaggcagcgaatttaccgaaagcgacccggaagaaattaaagatcgtctggaaaaacaggtagatttgattattcacggcggctatctcgggcagaaaccgacaacggttattgatcttaccgatgatacgccggtcgtggtgcgtgaaggcgtaggtgatgtgaagcctttcttataacaaattgcgttccacggatggaagactatggcagggaagtttcgctgcattttgctgttgatagcagggctgtttgtaagttctctaagttatgcagaaaacacggagatcccttcttatgaagaagggatcagcctctttgatgttgaagccactctgcaaccagatggggtgctcgacatcaaagaaaatattcattttcaggcgcgaaatcagcagattaagcacggcttttatcgtgatttaccacgactatggatgcagcctgatggggacgctgcactgctgaactatcatattgttggcgtcacccgtgatggtattcctgaaccctggcatcttgactggcatatcgggttaatgagtattgtcgtgggcgataaacaacgtttcttgcctcaaggcgactatcattatcaaattcattatcaggttaaaaatgctttcctgcgtgagggggattctgatctgctaatctggaacgtgaccggtaaccactggccgtttgaaatttataagacccgtttttctctccagttctctaatattgcgggtaatccatttagcgaaatcgatctttttaccggagaagagggcgacacatatcgtaatggccgcatccttgaggacggaagaattgaatcccgcgatccgttttatcgtgaagatttcacggtcctctaccgctggcctcacgctttacttagcaatgccagcgctccgcaaacgacgaatattttcagccatcttcttttaccctccacgagtagcttgttaatttggtttccgtgtctgttcctggtttgtggatggttatatctctggaagcgcaggccgcaatttacgccggtagatgtgattgaaaccgatgtcattccgccagattacacgcccggcatgttacgtctcgatgcgaagctagtttacgacgataaaggtttttgtgccgatatcgtaaatctgattgtgaaaggaaaaattcatctggaagatcagtctgacaagaaccagcaaatcctgattcgtgttaatgaaggcgcgaccagaaataatgcggtattactgcccgcagagcagttattactggaagcgttatttcgtaaaggcgataaggtcgttcttacggggagacgcaacagagtcttacgcagggcatttttacggatgcagaaattttatctgccgcgtaaaaagtctagcttttaccggtctgatacttttttgcaatggggtggactggcaatattggcggtcattctttacggtaacttgagtcctgtaggctgggcaggaatgagtctggtgggcgatatgtttattatgatctgctggattattccttttttattttgttcccttgagcttttgtttgcccgcgatgatgacaagccttgcgttaatcgtgtaatcatcactttgtttttaccactgatttgtagtggcgtggccttctattctctctacatcaatgtcggagatgtattcttttactggtatatgccagcgggttattttaccgctgtttgcctgaccggttatctcactggcatggggtatatttttctgccaaagtttacccaaactggacagcaacgttatgcccacggtgaagctatcgttaactatcttgcgcgtaaagaggcagcaacacacagtggacgtcggcggaaaggggaaacacggaaactggattacgcgttgctaggttgggctataagcgcaaatttggggagggaatgggcgttacgcattgcccctagcctttctagcgcgattcgcgctccagagattgcccgtaacggcgttttattcagtttacagacgcacctaagttgcggggccaataccagtttgttggggcgaagttattccggtggtggtgctggcggcggcgcgggtggcggaggcggtggtggctggtaattaagctgatgttaatcgaaacaagctttaaccataaagatagtgtagtatgttgcgcctcaaagccaggccgataaacgtcgagtcgtttacttaaggcctgaagagttcaaacagactttactatcagtgagtcagatgtaagttctgactcactgttgcacaaaagcatatcagacgcctgggaaggcgacaccaaaaggaagctctatgagcgaaaagctacagaaagtgctggcgcgtgccggccacggttctcgccgtgaaatcgaatctattattgaagccggtcgtgtgagtgttgatggcaaaattgctaaactcggcgatcgtgttgaagttacccctggattgaaaatccgtatcgatggtcacctgattagcgtacgtgagtccgctgaacaaatttgtcgcgttctggcctattacaaaccggaaggtgagttgtgtacccgtaacgatccggaaggacgtccaacggtgtttgaccgtctgccaaaactgcgtggcgcacgctggattgccgtgggtcgcttggacgttaatacctgtggtctgctgctgttcaccaccgatggtgaactggcaaaccgtttaatgcacccaagccgtgaagttgaacgtgaatatgccgtgcgtgtatttggtcaggttgacgacgcgaaactgcgtgatttgagtcgtggcgtgcagttggaagatggtccggcagcttttaaaaccatcaagttcagcggcggcgaagggatcaaccagtggtacaacgtgactctgaccgaaggccgtaaccgtgaagttcgtcgtctgtgggaagcggttggtgtgcaggtgagccgcctgatccgtgttcgttacggtgatatcccactgccaaaaggtctgccacgcggtggctggacggagctggacctcgcccagactaactatctgcgcgaactggtggagctaccgccagaaaccagctctaaagtcgctgtagaaaaagaccgtcgtcgcatgaaggcgaatcagattcgtcgtgcggtgaaacgtcacagtcaggtgagcggcggtcgtcgttctggcggacgtaataataacggttaatcaaagtatgccggacgtcatatccggcatttttacagattaataatcgatccctatctgcgcttttacaccggcatcaaacgcatgtttgacggggcgtaattcacttaccgtatctgccagttcaagaatatcccgatgacaaccacgacccgtgataatcaccgtctgttgatgtggacgttcatttaacgcctgcaccacttcttccagtggcaaatagtcatacgccaccatatacgtcagttcatcaagcaaaaccatatccagactggaatcagcaagcatccgctttgcatgttgccagacttcgcggcaggcggcggtatcagactcgcggttttgtgtatcccaggtaaagcccgttgccatcacctgaaactcaacgccatgtggctccagcagattgcgttcgccattaggccaggtgcctttaataaactgcacgacgcctactttttttccgtgaccaactgcgcgtgttgccgtaccaaatgccgcggtggttttgccttttccattgccggtaaagacgatgataataccgcgttcatcctgggcctgggccacacgagcatctactttttctttcactcgctgctgacgctgttggtagcgttcatcactcattgggaaattcctggtttacggcccggttgggcgtcaaaggtcatgccggttttacggcggctgtcatcgcccatcagccagaggtagagcggcatgatatcagcgggtgttttaagtttctgtggatcttcggtcgggaaggcgctggcacgcattgcggtgcgcgtaccgcctgggttaatgcagttgacacgcaggcgctgctgatattcatcggccagtacctgcatcatcccttcggtggcaaatttgctcgctgcatatgcaccccagttggctcgtccctgacgtccaacgctactactagtaaagaccagactaccggcgtcgcttttgagtaataaaggaagcagtgcctgggtgagcataaaggtggcattaacgttgacctgcatgacgtcctgccagacctgcggattttgttcgctcattgggcaaacatcgccgagcaatccggcattatgcaaaacaccatccagacgcggataattaacggcaatgcgctgtgccagttgttggcaattttcggacgtgcaggtcagcaaatcgagaataaaccactgtggctgacgcccagtttcttcgtttatgtggctggctacctgacgtaatttttcttcattacggcccaacagaatcactgtcgcaccatagcgtgcatacgtcatcgcggcttcacgaccaataccatcgctggctcccgtcaccaggataatgcgatcattgagtaaatcttgttttggctggtaatgcatggctactcctcaacgacgttgtctgtcgcgctgccagtgtactttatgactttggggctttatgcctgaaacagaagggcatttcaatcagcctggggcgataacaccgcaaaatggatactttgtcatactttcgctgcaataacatctctgcgagacggcttaacatgcctgttgtaaactgtgagccaaagcgttgtttaaccaaggtggggactcgtggaattgttgtctgaatatggtttgtttttggcgaaaatcgttaccgttgtgctagcgattgcggcgattgccgccattattgtcaatgttgctcaacgtaataaacgccagcgtggcgagttacgggtcaacaatctcagcgaacagtataaggagatgaaagaagaactggccgcggcgctgatggacagtcatcagcaaaaacagtggcacaaagcgcagaagaaaaagcataagcaagaagcgaaagcagcaaaagcgaaagccaaactgggcgaggtggcaactgacagtaaaccccgcgtctgggtgctggattttaaaggcagcatggacgcccatgaagtgaacagcctacgtgaagagataacggctgtactcgcagcattcaaaccgcaggatcaggttgtgctccgtctggaaagccctggtggcatggtgcatggttacgggctggcggctagccaactgcagcgtctgcgcgataaaaacattcctttaactgttacggtagacaaagtcgctgccagcggcggttacatgatggcctgtgtggcggacaaaattgtttccgcaccgtttgctattgtgggttccattggcgtggtggcgcaaatgcccaactttaaccgcttcctgaaaagcaaagatattgatatcgaactgcacactgccgggcagtataagcgcacgctgacgttgctgggtgaaaataccgaagaagggcgggagaaattccgcgaagagttgaacgaaacgcatcagttgtttaaagattttgtgaagcgtatgcgtccttctctggatattgaacaggtggcaacgggtgaacactggtacggacaacaggcggtagagaaaggcctggttgatgaaatcaacaccagtgatgaagttattcttagcctgatggaaggccgtgaagtggtcaatgtacgctatatgcagcgtaaacgactcattgaccgattcaccggcagcgcggcagagagcgccgatcgattgttgctacgctggtggcagcggggtcaaaagccattgatgtaaaagacaaacgcgaggctaagacctcgcgttttgctttaatcaaccagatgatatttttcactaagcacatgggccaggtgtttgaacatattaaacaccgcggtgcttttggctgttggcaatccttgttcatctaaaaagtagtcgccggtaaataccagcacgccattacgctgcgtgacgccggtggcttcaatccctgcgagcgtatcctcatgctcacgaatgattttgttggcctctttcaacagcgtttcgcggtcgatgggttgtgtctctttgttcattatttactccttaaacaaggacattagtctacgccaggcatggcttgcagacaaatataccacgctggtggcaagagcgccttactggcaactttggattttgcatgctaataaagttgcgtatcggattttatcaggtacagtgtgacgctttcgtcaatctggcaatagatttgcttgacattcgaccaaaattccgtcgtgctatagcgcctgtaggccaagacctgttaactcagtcacctgaattttcgtgaacagagtcacgacaaggggttgatatccgcagagagcgagtccatatcggtaactcgttgccagtggaaggtttatcaacgtgcgacgcattcctggaagaatcaaattaggtaaggtgaatatgggtaaagctcttgtcatcgttgagtccccggcaaaagccaaaacgatcaacaagtatctgggtagtgactacgtggtgaaatccagcgtcggtcacatccgcgatttgccgaccagtggcagtgctgccaaaaagagtgccgactctacctccaccaagacggctaaaaagcctaaaaaggatgaacgtggcgctctcgtcaaccgtatgggggttgacccgtggcacaattgggaggcgcactatgaagtgttgcctggtaaagagaaggtcgtctctgaactgaaacaactggctgaaaaagccgaccacatctatctcgcaaccgaccttgaccgcgaaggggaagccattgcatggcacctgcgggaagtgattgggggtgatgatgcgcgctatagccgagtggtgtttaacgaaattactaaaaacgcgatccgccaggcatttaacaaaccgggtgagctgaatattgatcgtgttaatgcccagcaggcgcgtcgctttatggaccgcgtggtggggtatatggttagcccgctgctatggaaaaagatcgctcgtggcctgtctgccggtcgtgtgcagagcgtggcggttcgcctggtggtcgagcgtgagcgtgaaattaaagcgttcgtgccggaagagttctgggaagtcgatgccagcacgaccacgccatctggtgaagcgttggcgttacaggtgactcatcagaacgacaaaccgttccgtccggtcaacaaagaacaaactcaggctgcggtaagtctgctggaaaaagcgcgctacagcgtgctggaacgtgaagacaaaccgacaaccagtaaacctggcgctccttttattacctctacgctgcaacaagctgccagcacccgtcttggatttggcgtgaaaaaaaccatgatgatggcgcagcgtttgtatgaagcaggctatatcacttacatgcgtaccgactccactaacctgagtcaggacgcggtaaatatggttcgcggttatatcagcgataattttggtaagaaatatctgccggaaagtccgaatcagtacgccagcaaagaaaacagtcaggaagcgcacgaagcgattcgtccttctgacgtcaatgtgatggcggaaagcctgaaggatatggaagcagatgcgcagaaactgtaccagttaatctggcgtcagttcgttgcctgccagatgaccccagcgaaatatgactccacgacgctgaccgttggtgcgggcgatttccgcctgaaagcacgcggtcgtattttgcgttttgatggctggacaaaagtgatgcctgcgttgcgtaaaggcgatgaagatcgcatcttaccagcagttaataaaggcgatgctctgacgctcgttgaacttacaccagcccagcactttaccaagccgccagcccgtttcagtgaagcaagcctggttgaagagctggaaaaacgcggtatcggtcgtccgtctacctatgcgagcatcattagcaccattcaggatcgtggctacgtgcgagtagaaaatcgtcgtttctatgcggaaaaaatgggcgaaatcgtcaccgatcgccttgaagaaaatttccgcgagttaatgaactacgactttaccgcgcagatggaaaacagcctcgaccaggtggcaaatcacgaagcagagtggaaagctgtactggatcacttcttcagcgatttcacccagcagttagataaagctgaaaaagatccggaagagggtggtatgcgcccgaaccagatggttctgaccagcattgactgcccgacttgtggtcgcaaaatggggattcgcacagcgagcaccggggtattccttggctgttctggctatgcgctgccgccgaaagagcgttgcaaaaccaccattaacctggtgccggaaaacgaagtgctgaacgtgctggaaggcgaagatgctgaaaccaacgcgctgcgcgcaaaacgtcgttgcccgaaatgcggcacggcgatggacagctatctcatcgatccgaaacgtaagttgcatgtctgtggtaataacccaacctgcgacggttacgagatcgaagagggcgaattccgcattaaaggttatgacggcccgatcgttgagtgtgaaaaatgtggctctgaaatgcacctgaaaatggggcgtttcggtaaatacatggcctgcaccaacgaagagtgtaaaaacacacgtaagattttacgtaacggcgaagtggcaccaccgaaagaagatccggtgccattacctgagctgccgtgcgaaaaaagtgatgcttatttcgtgctgcgtgacggtgctgccggtgtgttcctggctgccaacactttcccgaaaagccgtgaaacgcgtgcgccactggtggaagagctttatcgcttccgcgaccgtctgccggaaaaactgcgttatctggccgatgcgccacagcaggatccggaaggtaataagaccatggttcgctttagccgtaaaaccaaacagcaatatgtctctagcgaaaaagacggaaaggcgactggctggagtgcattttatgttgatggcaaatgggttgaaggaaaaaataacctttaattctgtcaggtttttataaacaaagggtcgcgaaagcggcccttttttattgcatattattttttcttcacacctatacactaaggctataaatgatatagtggttatagttagcaccttttttattattaaatcgtattagtcacccgccaggtgtgacgaaaaaacgatgttctgatggcgtctaagtggatggtttaacatgaaattacaacaacttcgctatattgttgaggtggtcaatcataacctgaatgtcagtagtacagcggaaggactttacacaagtcaacccgggatcagtaaacaagtcagaatgctggaagacgagctaggcattcaaattttttcccgaagcggcaagcacctgacgcaggtaacgccagcagggcaagaaataattcgtatcgctcgcgaagtcctgagcaaagtcgatgccataaaaagcgttgccggagagcacacctggccggataaaggtagtctgtatatcgccaccacgcatacccaggcacgctacgcattaccaaacgtcatcaaaggctttattgagcgttatcctcgcgtttctttgcatatgcaccagggcagcccgacacaaattgctgatgccgtctctaaaggcaatgctgatttcgctatcgccacagaagcgctgcatctgtatgaagatttagtgatgttaccgtgctaccactggaatcgggctattgtagtcactccggatcacccgctggcaggcaaaaaagccattaccattgaagaactggcgcaatatccgttggtgacatataccttcggctttaccggacgtagtgaactggatactgcctttaatcgcgcagggttaacgccgcgtatcgttttcacggcaacggatgctgacgtcattaaaacttacgtccggttagggctgggggtaggggtcattgccagcatggcggtggatccggtcgccgatcccgaccttgtgcgtgttgatgctcacgatatcttcagccacagtacaaccaaaattggttttcgccgtagtactttcttgcgcagttatatgtatgatttcattcagcgttttgcaccgcatttaacgcgtgatgtcgttgatgcggctgtcgcattgcgctctaatgaagaaattgaggtcatgtttaaagatataaaactgccggaaaaataatttcttgcgttattttcggcaccttttatgtagcgaaggtgccggaatatattctcttttgttacttatttctataccgtgcacaatatttttatccctcatatttatagggtaaattacctgtaaagtagtgtctaattacccgcctcgcaaactccagttttcaaatatctatttcaggtcaaaagattgaattattcactggagacgattcgtaaattcgctggatttttgactaaagtttctttaggatttgtctcatcgtatgattaattacaccaatcgttcaacgtcttgctgataagtgatggcgattatatgaggttagcaatgccttctggaaatcaggaaccccgccgcgatcctgaattaaaacgtaaagcctggctggcggtttttcttggttctgcacttttctgggtggttgtcgcactgctgatttggaaagtgtggggataactatggtcggtcaggagcaactggagtcgtcaccattatgccagcatagtgacaatgaaacagaaacgaaacgggaatgttccgtcgttattccagacgactggcaactaacatcgcagcagcaagcctttatagaactgtttgctgaagatgatcagccgaaacaataattatcatcattcttattacccatttttaatgaattaaagggcttttaatacaccgcagcaataacagcttgagttatctcaacacaaaataataaccgttaagggtgtagcctatgatcaacacaaatatgaaatattggtcctggatgggcgcgttttctctgtcgatgctcttctgggccgaactcctctggatcattactcactgatccttgaccccgctgcggcggggttgtcatttgctttgccacaaggtttctcctcttttatcaatttgggttgttatcaaatcgttacgcgatgtttgtgttatctttaatattcaccctgaagagaatcagggcttcgcaaccctgtcattaaggaggagctatgagcagtaccctacgagaagccagtaaggacacgttgcaggccaaagataaaacttaccactactacagcctgccgcttgctgctaaaagtctgggcgatatcacccgtctacccaagagtctcaaagttttgctcgaaaacctgctgcgctggcaggatggtaacagcgttaccgaagaggatatccacgcgctggcaggatggctgaaaaatgcccatgctgaccgtgaaattgcctaccgcccggcaagggtgctgatgcaggactttaccggcgtacctgccgttgttgatctggcggcaatgcgcgaagcggttaaacgcctcggcggcgatactgcaaaggttaacccgctcagtccggtcgacctggtcattgaccacagcgtgaccgtcgatcgttttggtgatgatgaggcatttgaagaaaacgtacgcctggaaatggagcgcaaccacgaacgttatgtgttcctgaaatggggaaagcaagcgttcagtcggtttagcgtcgtgccgccaggcacaggcatttgccatcaggttaacctcgaatatctcggcaaagcagtgtggagtgaattgcaggacggtgaatggattgcttatccggatacactcgttggtactgacagccacaccaccatgatcaacggccttggcgtgctggggtggggcgttggtgggatcgaagcagaagccgcaatgttaggccagccggtttccatgcttatcccggatgtagtgggcttcaaacttaccggaaaattacgtgaaggtattaccgccacagacctggttctcactgttacccaaatgctgcgcaaacatggcgtggtggggaaattcgtcgaattttatggtgatggtctggatagtctaccgttggcggatcgcgccaccattgccaatatgagcccagaatatggtgccacctgtggcttcttcccaatcgatgctgtaaccctcgattacatgcgtttaagcgggcgcagcgaagatcaggtcgagttggtcgaaaaatatgccaaagcgcagggcatgtggcgtaacccgggcgatgaaccaatttttaccagtacgttagaactggatatgaatgacgttgaagcgagcctggcagggcctaaacgcccacaggatcgcgttgcactgcccgatgtaccaaaagcatttgccgccagtaacgaactggaagtgaatgccacgcataaagatcgccagccggtcgattatgttatgaacggacatcagtatcagttacctgatggcgctgtggtcattgctgcgataaccagctgcaccaacacctctaacccaagtgtgctgatggccgcaggcttgctggcgaaaaaagccgtaactctgggcctcaagcggcaaccatgggtcaaagcgagcctggcaccgggtagcaaagtcgtttctgattatctggcaaaagcgaaactgacaccgtatctcgacgaactggggtttaaccttgtgggatacggttgtaccacctgtattggtaactctgggccgctgcccgatcctatcgaaacggcaatcaaaaaaagcgatttaaccgtcggtgcggtgctgtccggcaaccgtaactttgaaggccgtatccatccgctggttaaaactaactggctggccagcccgccgctggtggttgcctatgcgctggcgggaaatatgaatatcaacctggcttctgagcctatcggccatgatcgcaaaggcgatccggtttatctgaaagatatctggccaagcgcacaagaaattgcccgtgcggtagaacaagtctccacagaaatgttccgcaaagagtacgcagaagtttttgaaggcacagcagagtggaagggaattaacgtcacacgatccgatacctacggttggcaggaggacagtacctatattcgcttaagccctttctttgatgaaatgcaggcaacaccagcaccagtggaagatattcacggtgcgcggatcctcgcaatgctgggggatagtgtcaccactgaccatatctctccggcgggcagtattaagcccgacagcccagcgggtcgatatctacaaggtcggggtgttgagcgaaaagactttaactcctacggtagccggcgtggtaaccatgaagtgatgatgcgcggcaccttcgccaatattcgcatccgtaatgaaatggtgcctggcgttgaagggggggtgacgcggcatttacctgacagcgacgtagtctctatttatgatgctgcgatgcgctataagcaggagcaaacgccgctggcggtgattgccgggaaagagtatggaagtggctccagtcgtgactgggcggcaaaaggtccgcgtctgcttggtattcgtgtggtgattgccgaaagctttgaacgaattcaccgtagcaatttaattggcatgggcatcctgccgctggaatttccgcaaggcgtaacgcgtaaaacgttagggctaaccggggaagagaagattgatattggcgatctgcaaaacctacaacccggcgcgacggttccggtgacgcttacgcgcgcggatggtagccaggaagtcgtaccctgccgttgtcgtatcgacaccgcgacggagttgacctactaccagaacgacggcattttgcattatgtcattcgtaatatgttgaagtaacaactatttgcttgccggttattttgcttccggcaagcaaatgaattacacaatgcaagagggttatttgttcagcaaatggcccattttctcggctttggtatcgagataatgttcgttattggggttacgacctacaatcaatggtacgcgttcaacaatattaatccctgcttcggtcagaatttcgacttttttcgggttattggttaacaagcggacttcattgacgccaaggagtttgaacatatcagcgcaaagagtgaagtcgcgctcatcagcggcgaagcctaactggtggttagcctctacggtatcgtaaccttgatcctgcagtgcgtaagcgcggattttattcagcagaccaatgttacgaccttcctgacggtgatacagcaaaataccacggccttcctcggcaatttgcgtcaatgccgcttcgagctggaagccacaatcgcagcgcaagctgaacagggcgtcaccggtcagacattcggaatggacgcgcgcaagtaccggggtatgcccggaaatatcgccatagactagcgcgacatgatcgtgtccggttgccagttcttcaaatcccaccatcaggaaatcgccccatggggttggcagtttggcttctgccacacgtttaagctgcatgaaattctccagataatgctggttctgtattggcttattttgccataacgagaaggggttcacctaatcacgacgcgtcgatcgttcacggaatggcacaaatctgtcaatttttcctggaactggcgttttcagttatgattgtgggacttatcaaaaaggagaggccatgcgtagcattgccagacgtaccgcagtgggagctgcactattgcttgtcatgccagtagccgtatggatttctggctggcgttggcaacctggagaacaaagttggctactaaaagcggctttttgggttactgaaactgtcacccagccctggggcgtcattacacatttgattttattcggctggtttctctggtgtctgcgttttcgcattaaggctgcctttgtattatttgccattctggcggccgcaatccttgtgggacaaggcgttaaatcctggatcaaagacaaagtccaggaaccacgaccttttgttatctggctggaaaaaacacatcatattccggttgatgagttctacactttaaagcgagcagaacgcggaaatctagtgaaagaacagttggctgaagagaaaaatatcccacaatatttgcgtagtcactggcagaaagagacggggtttgcctttccttccggtcacacgatgtttgctgccagttgggcactgctggccgttggtttgctgtggccgcgtcggcgaacgttaaccattgctatcttgctggtctgggcaacgggagtcatgggaagccgcctgctgctcgggatgcattggccacgcgatctggtagtagctacgttgattagctgggcgctggtggcggtggcaacgtggcttgcgcaacgaatttgtgggccattaacaccacctgcggaagaaaatcgcgaaatagcgcaacgagaacaagaaagttaacgctggttgattttccgaatttagcccttaaatcatcaacaatgcgtgtggatgccatttcgcagacggcgcgaaaatggtactttaaagggctattgcggtaagttgaccataatttattcgctctaaccacataacgggaagtaatgtgaaatatttactcattttcttactggtgttagcgatcttcgtgattagcgtcacgttgggtgcgcagaacgatcaacaggtgacgtttaattatctgttagcgcaaggggagtaccgtatttccacattgctggcggtattgtttgctgcggggtttgctatcggttggttgatttgtggcctgttctggctgcgagttcgtgtttccctggcgcgcgctgaacgtaaaataaagcgactggaaaaccagcttagtcccgcgactgacgtggctgtagtgccgcacagcagtgcggcgaaggaataactttctatgctggagttgttgtttctgcttttgcctgtagccgctgcctatggctggtatatgggccgcagaagtgcgcaacaaaacaagcaagatgaagccaaccgcttgagccgtgattacgtagcgggggttaacttcctgcttagtaatcaacaggataaagcggtagacctgtttctcgatatgcttaaagaggatacaggcaccgttgaagcccaccttacgctcggaaacctgttccgtagccgtggcgaagttgatcgcgctattcgcatccatcagaccctaatggaaagcgccagcctgacctatgaacagcgtctgttggcgattcaacaactggggcgtgattacatggccgccgggttatatgaccgcgcggaagacatgttcaatcagctgaccgatgaaactgacttccgcattggcgcgctgcaacagttgctacaaatctaccaggctaccagtgagtggcagaaagcaattgatgttgccgaacgcctggtgaagctgggtaaagataaacagcgcgtcgaaattgcccatttctactgtgagttagccctgcagcatatggccagcgacgatctcgatcgtgccatgaccttgctaaaaaaaggggcggcggcagataaaaacagcgcccgcgtatccataatgatgggacgcgtgtttatggcgaaaggagaatacgccaaagccgtcgaaagtctgcaacgcgtgatatcccaggacagagaactggtcagcgaaacgctggaaatgttgcaaacctgctatcagcagttgggtaaaactgccgaatgggcagaattcctgcagcgtgcggtggaagagaacaccggtgccgatgctgaattgatgcttgctgatatcatcgaagcgcgcgacggtagtgaggccgcacaggtctatattacgcgccagcttcagcgtcatccgaccatgcgtgtgttccataagttaatggattaccacttaaatgaagcggaagaagggcgtgccaaagagagcctgatggtgctgcgtgacatggttggcgagaaggtacgtagtaagcctcgttatcgttgccagaaatgtggttttaccgcatacaccctctactggcattgtccgtcttgtcgggcctggagtaccattaaaccgattcgcggtcttgatggcctgtaatttttaaaaaaaatccgactttagttacaacatactaattattaatgttccattgtgctccggcaacgacggcgcagaaaaagcctgccaggggagaaatcgcaactgttaattttttatttccacgggtagaatgctcgccgtttacctgtttcgcgccacttccggtgcccatcatcaagaaggtctggtcatgacgttaactgctagttcttcttcccgcgctgttacgaattctcctgtggttgttgcccttgattatcataatcgtgatgacgcgctggcctttgtcgacaagatcgacccacgcgattgtcgtctgaaggtcggcaaagagatgtttacattgtttgggccacagtttgtgcgcgaacttcaacagcgtggttttgatatctttcttgacctgaaattccacgatatccccaacactgcagcgcacgctgtcgctgctgcagctgacttaggcgtgtggatggtgaatgttcatgcctctggtggggcgcgtatgatgaccgcagcgcgtgaggcactggttccgtttggcaaagatgcaccgcttttgattgctgtgacagtgttgaccagcatggaagccagcgacctggtcgatcttggcatgacactgagtcctgcagattatgcagaacgtctggcggcactgacgcaaaaatgtggccttgatggtgtggtgtgttctgctcaggaagctgtgcgctttaaacaggtattcggtcaggagttcaaactggttacgccgggcattcgtccgcaggggagtgaagctggtgaccagcgccgcattatgacgccagaacaggcgttgagcgctggtgttgattatatggtgattggtcgcccggtaacgcaaagcgtagatccagcgcagacgctgaaagcgatcaacgcctctttacagcggagtgcatgatgagtgattccaacagccgtctggtctacagtacggaaaccggacgtattgatgagtccaaagcggcccctgtacgccctaaaggcgacggtgtggtgcgtattcagcgtcagaccagtggacgtaaaggtaagggcgtttgcctgattaccggtgtcgatctcgatgatgccgaactgacaaaacttgcagcggaactgaagaaaaaatgcggctgcggcggagcagttaaagatggagttattgaaatccagggcgataagcgtgatttattaaaaagtctacttgaagcgaaagggatgaaggtaaaactcgcaggcggttaacataaaaagccacggatatatccgtggctttcgaatattttactgtgcgtattattcagttatttcgtactgaacagaatcaagcgtattataattgcgagtcgataatcgacatttatttacgattatttaccgacctggtgaccaataacacctccgacagctgcaccacctaatgtacccaacgtactgccatcggtcagtactgcaccgcctaatgcccctgcacccgcgccgattgcggtgttgcggtcccgtttagaccagttagaacaggcactcagagacattgccaaagtaattgccagaacagccgcggtcatttttttgctcgttacaaacataatactctctcctgaatttatgattcacggaagtaagctctctataactataatagctaagaataagtctggtgaaattattccgtgaaatctgctcgcgcgcagggttatatcacgcaggtgataatgacttcctgttatatcgctgataataattttatatcttgagagtgttaataacaggtaaatagtcttaattatcaaccaggaatcatcttagagcggatgatttgccaaactgcaaatcatccgtagagaagggaaatggttaaatgtcaacgacgtgaatggtgagtttactgtgctcaagatgcatcagatcgctggcgcgtattttgctatcggtaatcacgcgattgaatcgctcaacgggaccgatggagtaactatgtacagcaccaaatttgctgctgtcagtcaggactatcgcttcgcactctttttccagcacggcattgaccacatcggtacgcatcatatcgcgaccggtaaatccagtttcaggttgccagccatcaataccaataaatgctttgctgaaatgcacctgttggatgcactggcgtgtcaaagggccaaccatactttcgctttttttctgatacacgccaccgagcaaaataacttcacaaggcgcgtctttcagcaaatgcgcgatgtagctgctgaccgtgatgatagtgacatttttcttctgctcgcccagagtccgggcgagtagggcattgctgctgccattttcgataaagatggtttcgcccggttgaaccaggctcgcggcaaactcggcgagttcacgcttcagcgtatagttgctcatcatacgggtttcgacgtcatcactatcaaggctaacagcaaagccatgtgcacggcggaggtaactcagtttttcgagtgtgttgagatcctggcgaatggtaacttcagaaactccagtggcttttgccagatcggttacgctaacctgaccctggtcaatgaccatctgtagaatagtttgttgtcgggaattcatcgctgtaattcttataacgttataatacttaataaaaaaatactgacgcgccgggcatcctcaaataggaaaacctgaaggcacgattgttaaatctcccacggtgccttcgggatgtctggcgtagattcagcaacctggcgcaagagttctgctttaagtatctcgagattatggatcgcagagtggtaatcgcctgccacaaggatatctaacacaatatcaatacgttcggcaacgcgctgggcatcaaattcagacatcaaggacatccttatagcaaaagggggaaaatgaataatgcaaaaattgccgctaaaagagaagtgtttaacagcaacggctaattatcatccaggaatacgatatataatgacgggatatagcgctaagtatatatattcatctacttatgcgcgcttcagatagcgtttataccagcgttcgaaggcgacggcgggcatcggtttggcaaacaaaaatccttgccgctcattgatcccgttcttggttaaaaaagcatcttcctttgcactctctacaccttcggcgatcacctgaagattcaatgcctgggccacagcgacgatcgcccggaccagactctggctgacaggttgtttgtgaatatctcgaacaaaaacctggtcaagtttgatggcatcgatcggaaagcgcgccagttggctaagactagagtagccggtaccaaaatcatccagatgcacttgcgcacctagttggctaaattgttgaataacagacagtgccagttcatcattctcaatcagacaactctctgtcagttcaacatctatagggcagtattcaaaattgagttcctggagaacctgtttcagggcggtgaaaatggtttgatcggcgagctgacgtgcagaaatatttaccgccactcgcaggtttatgcctttatcccgccactttgccacctggcgtacgacatcgagaatcacccaacggcctaaaggcacaattagcccactctcttcggcgtaggaaatgaagtccaacggtggaatcaacccacgttcaggactctgccaacgtactagtgcttccagactgcgcacttcgccacgccaggtgattttcggttgatagtgaataaccaactgatcgttttccagtgctttacgcaagttggtatccagccagagatattcaaatacccgttgattcatttctggggtaaaaacgcaaaattgtcctcgtccgccttccttcgctgtgtacattgctgtgtcggcgtgacgaataatagccgtgctgtcactaccatgttcgggagagagtgcaatacctacactacagctggtataaacttcaattaaaccaatgcgaaaggggagccgtaagcgggtcaaaattcgacttgccattgcttccagcgcgctttgactggtgttggatgccagtaccagaaactcatccccacctggacgagccaacacctggtcatgttcgagacagcttaaaatagccaaactcacgtcgcgtaataactggtcaccaaacaaatgcccataggcgtcgttgacctttttgaaattatccaaatcaagatacacaaccccaactttattgttatctgcatgattaatagcgtgatcgattaaatcctgcattgcgttacgattcggcagtccggtgatactgtcggtatttgccagaatacgcagtcgctcctgagcgcggcgctcttcggtaatgtcggtgccggaacagattaaaaaaatctcgtttttgccactgccgctgtggacaaatttattgcgaaacagaaacagccgctggcctttacatgttggtatccacagttcgacttcatatgcattgccgcttcgaaaaaatacacggttattgcgcctggatgccgcagcttcacgacggctcataaacagtttaaacacgctttgcccaatgacgtcgtgttctttcaaccctgtgtaatcttcacataaccgattgaagcgttggatattcccccggctgtcgagaatcactattgcggaatatgcttcagaaactacctgctcagcaaaggaaagcccgtgacttaaatcacgagcaaccgccggtgtgtcatgccatgcagacgcgttgccagcccattcccgtttattgatttttcgtcctaccagatgcacagaaagatcgctttcatcgacggtcagactcatcatcaggctggaggtgatggccgtcatttccctgatgcgagcagcctgttcggcagataactgcaatgtacgatcaggttctgtggtttcggtggtagaaaagcgcaaaacatcgctgctttccgtcaaccgccagtatggattgtggcttccgagaaagttgtacaacgttgtggactccctaacggttttcatgatgcatatcctccggttaacagcggagtccgcggttaaataaaaggaacaacatgacttacatgaaattaacggcggctaaacgcattgttttttttatatatttatttgtaatccagttttggaaaaacgccagttttcaaacgaaagtcagttaaaaaatctgcctggatataacgaaggtagagcggggaaataaacggcccatccatgaggaatgggccgtgaaaggagattacgcgaccgggcgcgcaataatgctgcgggtttccatgcggacttcggcaatagtgacgtcaataacgtcagtcactttgtaaaccgtttcacctttaatttgtacagtgccgttttcctggctgcaaaccagttcatcgcgcacagcgtgtaagaaaggtgccggaataaaggcgatagcgccgttatcaaccaaacgaacacgcatgccgccacggctgatatcgacaatttccgctgcgaaacgggtgtcggtcccggctttgtctttcaggaagcgtgcgtataaccagtcaccaacatcacgttctgccatccggttgagacggcgacgctcggccatttggacagtgatttcatcctgtgggcgcgtcgcagtttcgcctttgataaccgctttcagcagacggtggttgatcatgtcgccatatttacggatcgggctagtccaggtggcgtatgcttccagaccgaggccaaagtgaggaccgggttcagtgctaatttcagcaaaactctggaagcgacgaatgcggctgtcgaggaaaccagttggttgcgcgtccagttcacgacgcagtttgcagaaaccgtccagcgtgagcacttcttcggcatcgacatgcagaccgtgcgttttcagcaacgctgccagcgcgtcggcattcgccggatcaaagcccatatgcacgttatagatgccaaaaccgagcttatcgcgcagtacgcgggccgcacaaatgttagcggcaatcatcgcttcttcgacgatacggttggcaatgcgacgaggctcggcgacgatatccagcacttcacctttttcaccgagaataaagcggtaatccgggcgatctttaaacaccagtgcgtggttatgacgccactcgccgcggcgttggcaaatttgcgctagcaaacggacttgttcggcaattgcttcactttcaggctgccagtcaccggtattttccagccagtcagaaacctggtcatacaccagctttgctttggattcgatggtggcggcaaagaattcgatattatcttcaatggtgccatcagcggagagcgtcatgcggcatgccagtaccgggcggacttcattggcgcgcagactgcagagatcgtcagaaagctcgcgaggcagcatagggatgttgaagccaggcagatagttggtgaatgcgcgaattttcgcggctttgtccagcttgctgccttcagcaatccacgcggttggatcggcaatcgccacaatcagctgaagtttgtcatccggcaacgccttagcgaaaagggcgtcatccatatcttctgtgctggcactgtcgatggtgacaaaatccagcgcggtcagatcttcacgaaccagaccttcatcgagcatttcggtagcgacgccgtctggtgcttctttttccagattatggcgtgcaagggtaacccaccacggtacaaagtgatcgtcaccaaaagtgatgtattgtgtcagttctgcatagaaagaacgatcgcctttcagcggatgacggcgcatttcggcaaccgcccagtcgccttctttaaactcgtggttcaggccacgggctgcgcggcaaggaatggcgtcttttaagagtggatgatcaggaacgatggccagacggtcatttttgccctgaaccttacccacgaaacgagtcaggaacggttcaaccagttcttctggctctgcggattcacgttctttttcactgtggatcaccgcgataattcggtcgccatgcatgacttttttcatctgcggcggcggaatgaaataacttttttgcgcgtcgacttccaggaagccaaagcctttttctgtggcttttaccaccccttcagcgcgtggcgtctgggaatgcagttgctgtttaagctgcgctagcagcgggttgtcctgaaacataattgtctattttggtggccattagagcggctgacagttttacgcgaatctgtctgacgcggcaaggttaatatgtctcacccaacgcgatttttaagcgatttatccagccacacagcccgctccataccagcagattaataatctgcgtactacttttttcgtgttcgagtaaagggctgaactgggcggcgctaaagcgatcgggtgctcgggtcagccattgtatcgcctgaacggtagcgcgctcaacagaatgacggtcagcccattggttaatttcattttcgcccttgcgcataagggtgctgatttttttatattcattactactatccatacaggtggcaaaacaagcaggactgccatttatacgcgcgcataacaacgccgcaagctgattatccggctgtgtattgccccgtgtgctgtttaacaacttttcgagaagggaaagactaatagggtggagagagagtatttcggccagttggcaaagttctgcagtactactttttgtgtgctcttcaggtagtttttccacctcatagctgcttcgccagcgtaaactttcatcagcaaacagactcgcgtcggcgtagttttgtatctccagcccgggtaaccagcgtaccggatgcccgagataagcctgaaatgtcgcaattgtccgcgcctgaaagccaataaaaccaatgatttggctaatgatcacacagtcccaggcagtaagaccgacgtcattcagatgctggcggcttcggttgtcgataatagaagggctgctagccagttggcgggcatattgcgtgatttgtgccaaccgatgattactttccctggtggaatcaggcccggggagcggcgtaagtcgcgcgctatagtagttacataaccgctggacgccgcaaacctgagcaaccgtcagggccgtgctcaagcgttcataagcggtgaaggtctgactacgggtcacggtaagctggtcagggaacaaatccactgcaagaacacgcgcagggtccagccaactaaggaagggggccagcgtttctttttcaaggatcacgtcgagtagaaagggatcgctgacctttgcggcttccgggaccagaggcagaacgtcatactccgtagtactggattgcgtttcatgataccagtggcttttgccggtgatgtggcgttgttccatgggcgctccttggtcgtaaaggaaatcgttatcctgacgcaaggcgggaaggggagaaagacggatcggcgataacaaatatcagaaaggtataacagagataacgggcggcagaacgccgcccatctttaccaacagaacgattatttcagttcgagttcgttcattgcagcaatgctgaaaccgccgtcaacgtggaccacttcaccggagataccggcagagagatcggagcacaggaatgccgcagagttacccacatcttcaatagtaacggtacggcgaatcggggtaacggcttcgcaatgagccagcattttgcggaagtctttgataccggaggccgccagagtacggatcggaccagcagagatggcgttaacacgcacaccttccggacccatcgcgttcgccatatagcgcacgttcgcttccagagacgcttttgccagacccataacgttgtagttcgggatagcgcgctcagcgccaaggtaggaaagggtcagcagggcagaacccggattcagcatggagcggcaagcttttgccattgcaacgaagctgtaggagctgatgtcgtgggcaattttgaagccttcacgggtaacggcgttaacatagtcaccatccagctgatcgccaggtgcaaaaccaatagagtgtacgaaaccgtcaaatttcggccaaactttccccagttcagcgaacatggtgtcgatgctggcatcttctgcaacatcgcactgcagaacgatgtcagaacccaattgagcggcaaattcttctacgcggcctttcagtttgtcgttctggtaggtgaatgccagttcagctccttcgcggtgcatcgcctgagcgataccgtaggcgatggatagtttgctggcaacaccggttaccagaatgcgcttaccggaaagaaaacccatagctttaatccttattgttgatgcttgttgtgcctgaaaatcaggcgattcgtcgttttagtaaacagtacgaacagataaacggttattataatcaacctggctgtgagtagctatagttgccaggtccgaccggagcaggctgcggcagggggggcgcttttcccctcaccctaaccctctccccagaggggcgaggggaccgtattgtgcaaatattgttaccccagcaacaaacaggctcatacagcccctaaccctttcatggcgatggctgggacggttcagaccttgccgaatattctccagcaccgtctccatgttttcaccacaacagctattcggctcggtctgccccctcgctctttcagggagagggactccggcggttcagttcctgcagaatattctccagcaccgtctcctcattacaatcaatctcgttattccagaaacgcagcacggtccagccctggctctcaagccagctagtgcgcctggaatcataggcaactgctaaatcatgctgcccaccatccagctcaacgactacacgcgcgctgcagcaagcaaaatcgagaatgtagctccccactggatgttgacggcgaaatttgaaatcactaaaacgtcggctgcgaagatatcgccagagctttcgttcctgcaaagtgagattgcgtcttaaatcacgcgcattacttttaattttatctatcacctcattctgacaagatttaatcttttgtcagaatgaggtgaataatctggaaggaggattcagaaaattagcgatctttacgccacgcatccgccgtcaatgcctcgccaaaatgaccggcaatcagccgtttggtgagttcatgcagcgggcttgccagcacatccgcggtgctgcctcgctcgacaacctcgccctgatgcatcaccagcacctggtcgctaatgtgcttcatcattccgatatgctgggtaacataaatatagctaatgccctgtttttcctgtaattccagcatcagattaatcaactggctacgcatgctcatatccagactagcgagggcttcatcggcaataatgacttttgggcgcaatatcagcgcgcgcgccagacccagacgctgtttttgtccgggtgccaacatatgcggatagtaactgacgtgatccggtagcagcccaaccatacgcatcgtttcaataatctgtttgcgacgctgttccggttccaggtcggtgttcaggcgcagtggaaaatccagaatttggctgatacgttgacggggattcaagctggtgctaggatcctgaaaaatcatgcgaatacgctgactgcggaaggaataatcgccaaaatgcagtggatgatcgtcaatcaataactcgccgctggtaggctctatcattcccgccagcatttttgccagcgtggatttaccgctaccattctcgccaataatcgccagtgtctggccttcacgtagcgtaaagctcaagggttttaccgcttctacggtctgacgacgaaaccagccggtccggtagcggaacgttttacttaaattacgcacttcaagcagcgtttcgatcatctcactctttctccatgttcagcgggaaatgacaggcatagagatgatttttcgcccccgtcaaacgtggcgtcacaatgcattctcgttgtgcatacgggcaacgtggccccagacgacaaccaatcggtaactgttccagcagtgggatagcgccgggcagcgtattgaggcgacttttatgcggcatcgcgctgccgaagtctggtatcgcgcggatcagcgcctgggtataaggatgatgtggcatcgtcaccaactccttactcggcgcggtttccactgtttgaccgcagtaaagcacgttaattttatccgcccattggctaagcatttgtaagtcatggctgataagcaaaatagtggtattgctgttttggttgagacgcgtcagcaggcgaaagatttgcgcctgggttgttggctccatactgttggtcggttcgtcagcaatcagcagacgcggttgattcgccagtgcaatggctatcatcactttctgacattcaccttcggtcaactcatagggaaaactgcgcatcgcatctttgtgatctttaatccccacgcggtgcagcagttcaatggcacggcgtttgcgccagccaaaacgctgccaccaacggcctttataggtccaggctgggatgttttgcatcaactggcggcccacacgttcactagggtcaagacagctctgcggttcctggaaaatcatgctcacgttatggccaaccagtttgcgccgttcgcgtgcggagagacgcagcaaatcgatatcatcaaaacgcatacggtcagcagtaacacgccagttatctttattcaccccacaaatcgctttcgcaatcaaactcttgccggaaccggattcaccaacaagaccgcggatttcaccttcggttaaggtcatacttacccggtcgacggctttaacccactcatcaccggttttaaattcaatggtcaggttacgaatatcgagtaatggcattattccacccccgcaataatcgcacgacgaacgccatcgccaaggaggttaaccaacaacacgctaatcataattgccgcacctggcagcatgacagtccacggggcgacataaatcagttccagcgcatcaccgagcatcgctccccattcagggctggggagttgtgcgccgagatcgagaaagcccagcgcggcgatatcgagaattgccatgctcagtgcgcgggtgatctcggtgaccagcccggcggtgatgtttggcatcacagcaaaccagagaatattcagcgtacttgcgccatccagacgggcggcgataacgtactctttttccagttcgtcatgcaccatgctgtaaatgctacgtaccatacgcggcagcaatgccagccagacagcaaacatagcgtgggacaaactcggtccggcaaacgctacaacgataattgccaacagcaggctagggatcgccagtaaggtatccagaatatggttaagcaccgcactgcggaggccgtgtgtcgccccggcgaaggtgcccagtaccaggccacagatcgtcgcggcaagcgtcaccacaaatgcgccacccacggttggcgcagctccgctcagtaaacggcttaaaacatcgcgtccgaggtcgtcagtccccaggaagaaagaaacttcgccatagcggctccaactcggcggcaataattgataaccgagaaattgctggtcgatgccgtaaggcgcaaaccagccgccaaaaatacacagtacagccagccccgcgcagccgtacaggccgaccatcgcagaggcgtcactataaaatttgcgccaggcggtacgcagcgtgcccggcgggcgcttttcgctgtatacgctatcgtaaggcataccattccttatgtttcagattatttatcgtaaggcataccattccttatgtttcagagggttagccatggcacccaaaatatcagaaatcacgttaacaataatgaccagactgccacacaccatcactccggcggaaatggctgcgtaatcctgctggcggatggcgttaattaaccagcgccctaaacccggccagctaaaaaccatttcggtgatcatcgccagcgtcagcatggtggaaaactgtaagcccaggcgaggaataaccggcggtaacgcgttatgcagaacgtggcgacgcaaaatagtaaagcggctcaaaccgcgggtcgccgccgcttttacatagttctggtcatacacttcgatagtgctgatacgcatcaggcggatcacttcagttgttggcgcaacgctcagggtgatcacgggcaatatcatatggcggattgcgctcatgatcatttcatcccgccatggactgtcgctaagccaggcatcaatcaacgcaaaaccggtaatcggtttcacttcgtagagcagatcgaaacgcccactaacgggcaaccaacctagcgtgagactacaaaacagcgtcaacagaagcgccagccagaacaccgggatactaaagcccagtaaggcgatggcgttgatcaagttatcctgccacttatggcgcgtaatcccggcaatcatccccacggggatgccaacaatcagcgcaaaaccgaaggcgaggatgcacagttccatcgtcgccgggaagacctcttttaactgttcggcaatcggttgaccgttaatgctggaaacaccaaaatcccagtggatcaggccgttaaaccagaacacccaggcattccacagactcgcgccttgtaacggcgcatgaggggtgaaatagctcaagctgaagccaacgaaggtcagcaggaacaaggtgacaatcaataacaaaatgcggcgtaaggtgaagataatcatggttttttcacctcatcctgtttctcgcgatacaccccagcaaaggaggcgttaccaaacgggctaagtaccagacctttgatatcgtaccgataggcctgcaaacgcaaactgctcgccagcggcaaaatgggcaattcctgcgccagaatactctgcgcttcgtcataggcttcaatacgcgccgccagctgctggctagagagcgccttacgcaatacgctgtcgaatttcggatcgcaccagtgggcgaggttggtctggctatgaattgccgcgcagctcagtaacggacggaagaaactgtccgggtcgttactgtccgtcgcccaaccggataacgtcagatcatggctcatatccatcaaccgcgcctcctgaaagcgaccttctaccggcacaatcaccacttttacgccaacctgcgccatatccgcctgaatcagttcggcagttttcagtggactggggttccacgcctggctacgtgtgggcacccacagtttcagcgttaaattttccagccccaagctcttcaactgttcgcggcttttcgccggattgtattcagtaattttagcctcgttgtcataggcccagctggcgcgcggtaaaatagaggccgccgtttcagccgtaccataatagatggattgcatcaggcgctggttattaatcgccagtgccagcgcatggcggacagcgggattatttagcggcggtttggcggtgttaaatgccagataggcgacgttcatcccaggacgcagcgttaaacgcaagcgcgggtcgtcacgcaaaatggatagctggctggcagcaggccaggccagaacgtcgcattccccggtcaggagtttgctcagacgtccggtgccgccggagcctaaatccaccactacctgcggcattaacggtttaccgcgccagaagtcatcatgacgttgtaggcgaataaattgcccggcgcggtattcgctcaactgatacggaccggtgccgaccggttgacggtcgagttgctcctggcgatcttctttctctaacttccgggcatattctgcgctcatgacgctagcataatgggttgcgaggtgccacaaaaaagaagcatccggctgggcgagtcggaactcaacggtatgattatccagtttgcggacgcttttcacgttatcggcaaattgcaggctgtcgaagtaggggaagttgctgccgttgacgttatgccacgggttgttgcggtcaaaaattcgctggaaggtaaacaccacatcgtcggcattcattttacgagtgggagtaaaccagtcggttttttgaaacggaacatcgcgacgcaggtggaagcgataggtcgcgccgttgtcgagtacttcccagctttcggcaagttccggcatcaggcgataggtatagggatcgacatccagcagtcgatcataaaactgggcggcaagggtatcgacaattaacccactgctcgctttggatgggttaaaggtgttgacttgcccgctgacgcaatagacaaaaccgctgtcgcggatatcagcatgcgggggagattcaggcgcggcgattgcctgaccactcacaagtccagcaatcaccaaaagagagcttaatacctggcgcataatattaagggattttatgtaaagaggctatcttactaatatttaatgacatttgccattaccgtttgtgttcaggggtcgtaatgagggccgtgtggttggtcgttgaacaggtgacgtcgccatctgttcaacattcgtacccgtgatttctctataactataactcacagaacaacttagcgaggagcagagcggtacgatcgtgagaaacccattaaagcacgctgcagtgcgtgtcattgttagccagatgcggcgtgaacgctttatccggacaacgatactgaccgatcgtctgcaattaaatcattactcattaccccattgattcaaaaactctgcgatctcatcaatgcgtacgggattaatccccgcttcagcagccatttcatgttgggcttcttcgctgatctcttcattgttcatcaaacgggtgagcagtaactggaagtagtgggccagcggtgtgcgttcagcctctgcgacaggctctgcgcattcggtcgcgtactcatcggcaatatcaaaatattttagcgggatatcgtggttcattatttgcccctggggttaatgcgctaagcataagggcggatgatagcactcgtgatccgggtcatacatctttttatagttaatggcgcggcgcgttaccctcaggcaggataatgcgccgcgcatccgactattacgtttcactcaccggcgttctgtcaccatcatacaacggcactttgcgatagcggcggatcagataccataaatatgcgccgcctaagctagcccataccagaccgagtgtcagactcgtactctcgaggttaacccacagcacacccaccgtcagcgcgccaaccagcggcatcagcaaatagtggaagtgatccttccagcttttattcattcctttacgccgccagaaatgattaaacacgctcagattcacgaaggtaaacgccaccagagcaccgaagttaattaacgctgtggcggtaactaaatcgaagaacagcgcgctcaacgcgacaatcccgaccataatgacgttgagtgccggagtccgccattttgggtgcacatagccaaacacgcgctccggaaacacattgtcacgccccatcacatacagcagacggctcacgctggcatgactagccaggccagaggctaacgtgttcacaaacgtggtgcagaggaaaatgctctggaagagcttgccgccgacgtacagcgcaatttcaggcagtgcggcatccggatctttaaagcggctgatatcgggaaagaacagctgcataaagaagctcgccgcgataaagataacgccaccgtagaccgccgtcaggaagatggctttcgggatcacgcgtgcggcgtccggcgtctcttcgctaagcgtggtcaccgcatcgaaaccgaggaaggagaaacagacaatcgtcgccccggtaataatcgggatcaggtgcgcgttctcgctgataaacggctgaagactccagacggtgccaacgccttctcctttatgcagtccctgaactaccaggaagataaacaccaccatgatggagatttgcaccagtacaaacagggtattgaagttagcgaccaggttgacgctcttcagattcgcggcggttaaaatggcgacgaaggttaccacccacacccacggcggcacttccgggaagagggcggagagatagattttcgccaacaagacgttaatcatcggcaaaaagagataatccagcaggctactccagccgaccataaatccgacgtgcgggttaatgctcttttgcgcgtaggtataggcgctaccggcctccggaaactggcgaaccagtttgccgtagctgatagcggtaaacagcacacccgccagcgccagcaaataggacgccggaacgtgaccgtcgctaatgccggagacaataccaaaagtatcaaatacggtcatcggcgtgagataggccagacccatcatcaccacctgccacaatttcagactttttcgcagacgggttttgccgggttgcgcagcaatattcagtggactattaatagccataattgctgcctcccctgcgtaataaggtttgcggtcgtgtcgacctgaaatcaaacctgtttagcaagggaagcaaagggggcggagtccagtcagtagcaggaggggcgcatacgcagcctccctcgccatgcggggatttaatcatcggcatcatctcatttcctcgtcacagtcttaatcgttaacggaagcccgttgccgcccgcgctccataacgcgacatccgggaaatgtctggattaccagcaaatgtcaggcctggctccgctcaggccgatgaaacaaccccgcaaggggtattacgcgtttttcaacatccactcaatttctgtttctgtgatgaggcgctcaaactgcaacagctcatcatttttacaggcgtgatagacatggcagaagcgttcgcctaaatagcggcgcaggtgatcattctcgataaactcacccagggcatcgctctggcgaatcggaaagggtaagccttcctgttccagcccgttgccttcgacttcttcctgcaacggcagctcgttatcaaggccatgcaaaataccggcaaaaatcgctgccatcaccagatatgggttggcatcggcacccgccacgcgatattccacgcggtgattatgacggtcgccgcacggaatacgcagggcgacggtgcggttgttatggccccagctcgcctgcgtcggcacatacattcccggctggaagcggcgatagctgttcacgtttggtgccagcaacgccatgctgctcggcatcaggtcaatcatcccggcgagcatctttttcagcagcgggctatcttcgccttccgcgtcagaaagcacgttctcgccacgattattttgcatactgatatggatatgcattccgctgcccgcgtgctcttcatacggcttcgccataaaagtggcgtgcatcttatgcttttctgccatcagacgcaccaggcgttttagtgccagcgcatcatcgcaggcttccagcacgttatcagtatggtaaaggttgatttcaaactgacccgggctggcctcagcgaccgcgccatctgccggaatcagctgtaactgcgccagttcatcaatatcattgagcacgtcggcgaagtggttgaggttatcaacggagtaaacctggctttgtgtattgcggtcatcggtgccaggcgcgcagggcggttgcagatacccttcagcgtcgcgctggcgatccagtaaatagaactccagctctaccgctacgaccgggaacaatccgcgctggcgcagctgctgccacaggcggttaagaacgttccgcggctcaacgtcaaagggagcgccatcttcatcgaccatggtcaggagcatctgaccgataaactctggatcggcggcagaaggagttaaggaaccgagaacaggaacacaggtacgatccggctcgcccatttcctgacccagacctgcttcttctactacgttgcccagaatatccattgcaaatacgctggccgggaaataacaccctttctcgagcttcttcaggctactaacaggaatacgctttccacggaagcaaccatttaaatcggtaagtaaaacatcaacatattgcgtattcgggtagcgctccaggtagcgtttcacttcctgcgtaaaggcgctaccccgcctctcttcactctgctgaacaaagttctctacttcaacgatattggtttccatgattcttcgcctttggtttgttttccgctcgttatcaaagcgtaaaatataatgaccaccattcgaatctgtatgcaaactaaatgtttgtcaaatgttaaattgagtttgcaaaaatgaaaacccactgctagattgaaaaaatattgaacataaaggtcatttaaagcgcagtaatggcgataatttagtccactttgtgagattgagcatggaaaatataatgaacaatccggttatcggtgtcgtaatgtgcaggaacaggcttaagggtcatgcgacccagactctgcaagaaaagtacctgaatgccatcatccatgcaggcggcttgcctattgcgctaccacatgcgctggcggaaccgagtttacttgaacaacttttgccgaaactcgatggcatttatcttcctggtagtcccagcaatgtgcagccgcacctatatggtgaaaacggcgatgagcctgacgccgatcccgggcgtgatcttctgagcatggcgataattaatgccgcactcgaaaggcgcatccccattttcgccatctgccggggtttacaagaactggtggtggcaaccggtggtagcttgcatcgcaagctgtgcgaacagcctgaattgctggaacatcgggaagatcccgaactgccggtggaacagcaatatgcaccgagccatgaagttcaggttgaagaggggggattactgtctgcgttgttacctgaatgtagcaacttttgggtaaactctctacatggacaaggggcgaaggtcgttagcccacggttgcgtgttgaagctcgcagcccggatggcttagttgaggcggttagcgtcatcaatcatccttttgcgctgggcgtacagtggcacccggaatggaacagtagcgagtacgcgcttagccgtatattgttcgagggctttatcaccgcttgtcagcaccatatcgctgaaaaacagcgactctgaccactacagtttaaggaaatgcaaatatgagtgatgagggactggcgccaggaaaacgcttgagcgaaatccgccagcagcaggggcttagtcaacgtcgtgccgccgaactctccgggctgactcacagtgctatcagtacgatagaacaagataaagtcagccctgccatcagtacgctgcaaaagctgctgaaggtgtatggtctgagtctcagcgaattcttttccgagccggaaaaacctgatgagccgcaggtcgtcattaatcaggacgacttaattgagatgggtagtcagggtgtgagtatgaagctggttcataacggtaacccgaatcgcacgctggcgatgatctttgaaacgtaccagccgggcacaaccactggggaaagaattaagcatcagggtgaggaaataggcactgtactggaaggtgaaattgttctgacgattaatggtcaggattaccacctcgtcgcggggcaaagttatgccattaataccggcatcccgcacagtttcagtaatacgagcgcaggtatttgccgaattatcagcgcccatacgcccaccacgttttaatctttttgttctgtaagccgggtaagcgcaatgcgcccggcaatctatacacaaaatcattcaagttgcatcaaggcggcaagtgagcgaatcccgatgagcttactcaggtaagtgattcgggggagcgaacgcagccaaggcagaggcggcttgaaggatgaagtgtatataaagaatgtcgccagaaataaacgggcatacggcccggggatctctgcgccctgacgttcacaaactgcatatatctgatagacgtgaaacaggagtcataatgaattttcatcatctggcttactggcaggataaagcgttaagtctcgccattgaaaaccgcttatttattaacggtgaatatactgctgcggcggaaaatgaaacctttgaaaccgttgatccggtcacccaggcaccgctggcgaaaattgcccgcggcaagagcgtcgatatcgaccgtgcgatgagcgcagcacgcggcgtatttgaacgcggcgactggagtctctcttctccggctaaacgtaaagcggtactgaataaactcgccgatttaatggaagcccacgccgaagagctggcactgctggaaactctcgacaccggcaaaccgattcgtcacagtctgcgtgatgatattcccggcgcggcgcgcgccattcgctggtacgccgaagcgatcgacaaagtgtatggcgaagtggcgaccaccagtagccatgagctggcgatgatcgtgcgtgaaccggtcggcgtgattgccgccatcgtgccgtggaacttcccgctgttgctgacttgctggaaactcggcccggcgctggcggcgggaaacagcgtgattctaaaaccgtctgaaaaaagtccgctcagtgcgattcgtctcgcggggctggcgaaagaagcaggcttgccggatggtgtgttgaacgtggtgacgggttttggtcatgaagccgggcaggcgctgagccgtcataacgatatcgacgccattgcctttaccggtagtacccgtaccgggaaacagctgctgaaagatgcgggcgacagcaacatgaaacgcgtctggctggaagcgggcggcaaaagcgccaacatcgttttcgctgactgcccggatttgcaacaggcggcaagcgccaccgcagcaggcattttctacaaccagggacaggtgtgcatcgccggaacgcgcctgttgctggaagagagcatcgccgatgaattcttagccctgttaaaacagcaggcgcaaaactggcagccgggccatccacttgatcccgcaaccaccatgggcaccttaatcgactgcgcccacgccgacagcgtccatagctttattcgggaaggcgaaagcaaagggcaactgttgttggatggccgtaacgccgggctggctgccgccatcggcccgaccatctttgtggatgtggacccgaatgcgtccttaagtcgcgaagagattttcggtccggtgctggtggtcacgcgtttcacaagtgaagaacaggcgctacagcttgccaacgacagccagtacggccttggcgcggcggtatggacgcgcgacctctcccgcgcgcaccgcatgagccgacgcctgaaagccggttccgtcttcgtcaataactacaacgacggcgatatgaccgtgccgtttggcggctataagcagagcggcaacggtcgcgacaaatccctgcatgcccttgaaaaattcactgaactgaaaaccatctggataagcctggaggcctgaaatgaccgaacataccagcagttactacgccgccagtgcgaataaatatgcaccattcgacacgctgaatgagagtatcacctgcgacgtttgcgtggttggcggcggctataccgggctctcctccgcgctgcatctggcggaagcgggctttgacgtagtggttctcgaagccagtcgcatcggctttggcgcaagcgggcgcaatggcggacagcttgtgaactcctacagccgcgacatcgacgtgatcgaaaaaagctacggcatggacaccgcccgtatgctcggcagcatgatgttcgaaggtggtgagatcatccgcgaacgtatcaaacgttatcagattgactgcgactaccgccccggcggcctgtttgtggcgatgaatgataaacagctcgccacacttgaagagcagaaagagaactgggaacgctacggcaataaacagctggaattgctggacgccaacgccattcgccgtgaagtagccagcgatcgctataccggtgcgctgctggatcacagcggtgggcatattcatccgctaaaccttgccattggcgaagcggacgccatccgcctcaacggcgggcgcgtgtatgaactttctgccgtgacgcagatccagcacaccacgccagccgttgtgcgaactgccaaaggtcaggtgacggcgaagtatgtgattgtcgccgggaatgcgtatctgggcgataaagtagagccggaactggcgaaacgcagcatgccgtgcggcacgcaggtgatcaccaccgaacggctgagcgaagatttagcccgtagcctgatcccgaaaaactactgtgtggaagactgtaactatctgcttgattactaccgtcttaccgccgacaaccgcctgctgtacggcggcggcgtggtctacggcgcgcgcgacccggatgacgttgagcgccttgtggtgccgaaactgctgaaaaccttcccgcagctgaagggcgtgaaaattgattaccgctggacgggcaacttcctgctgaccctgagccgtatgccgcagtttggtcgcctcgataccaacatctattacatgcagggctacagcggccacggcgtgacctgtactcatctagccggacgtttgattgccgaactgctgcgcggcgacgccgaacgtttcgatgccttcgccaatctgccgcattacccgttccccggcgggcgcacgctgcgtgtgccgtttaccgcgatgggcgcggcgtattacagcctgcgcgatcgtctgggcgtttaattttcgattaaccgtgaagagtcaaaaggtgtgaaacatgagcaacaatgaattccatcagcgtcgtctttctgccactccgcgcggggttggcgtgatgtgtaacttcttcgcccagagcgctgaaaacgccacgctgaaggatgttgagggcaacgagtacatcgatttcgccgcaggcattgcggtgctgaataccggacatcgccaccctgatctggtcgcggcggtggagcagcaactgcaacagtttacccacaccgcgtatcagattgtgccgtatgaaagctacgtcaccctggcggagaaaatcaacgcccttgccccggtgagcgggcaggccaaaaccgcgttcttcaccaccggtgcggaagcggtggaaaacgcggtgaaaattgctcgcgcccataccggacgccctggcgtgattgcgtttagcggcggctttcacggtcgtacgtatatgaccatggcgctgaccggaaaagttgcgccgtacaaaatcggcttcggcccgttccctggtagcgtgtatcacgtaccttatccgagtgatttacacggcattagtacacaggactccctcgacgccatcgaacgcttgtttaaaagtgacatcgaagcgaagcaggtggcggcgattattttcgaaccggtgcagggcgagggcggtttcaacgttgcgccaaaagagctggttgccgctattcgccgcctgtgcgacgagcacggtattgtgatgattgctgatgaagtgcaaagcggctttgcgcgtaccggtaagctgtttgccatggatcattacgccgataagccggatttaatgacgatggcgaaaagcctcgcgggcgggatgccgcttagcggcgtggtcggtaacgcgaatattatggacgcacccgcgccgggcgggcttggcggcacctacgccggtaacccgctggcggtggctgccgcgcacgcggtgctcaacattatcgacaaagaaagtctctgcgaacgcgcgaatcaactgggccagcgtctcaaaaacacgttgattgatgccaaagaaagcgttccggccattgctgcggtacgcggcctggggagcatgattgcggtagagtttaacgatccgcaaacgggcgagccgagtgcggcgattgcacagaaaatccagcaacgcgcgctggcgcaggggctgctcctgctgacctgtggcgcatacggcaacgtgattcgcttcctgtatccgctgaccatcccggatgcgcaattcgatgcggcaatgaaaattttgcaggatgcgctgagcgattaatagcccaacgcaataatgtctgatgcgctgcgcttatcaggcctgcaaacgacgtattgattatgtatgccgaataaagcattcacgccgcatccggcaagttgtattgctcaacttcgttaaatctggtgctttttcaacaacgcgcggaactgatgataagttaaccccagtaattcagccgcgcgcttctggttatatttcccttgttgcaaactgagttgcagcaactctttttcctgctgcatctgaaactcacgtaaatccagcggcagtgttggaaggctggtggtttcactaacggcgatagcgtcttcaggcggacgccgtttaaagggatcaataatgatgtcatcaagcggataatcgctggtgccgtggcgatacacactacgttccaccacgtttttcaattcacgaatatttcccggccaacgataattcagcaatgtttctctggcgcgctccgtaaaccccgggaacagaggcagcttgatttcccgacacatctggatggcaaagtattctgccatcaacattatgtcgctttcgcgctcgcgcagtggtggcagttgtacaacatcaaaagccagtcggtcgagcaggtcagcgcgaaaagtgccttcattgaccatcgccgggagatcggcattcgtcgcgcataccaaccgcacattcacctgcaatggttggctgccgccaacgcgctccagttcaccgtactcaatcacgcgcaataatttctcctgcaccatcatcggtgccgtagcgagttcatcaagaaatagcgtaccgccgtcggcacgttcaaatctccctggatgacgtttttgcgcaccggtaaacgcccccgcttcgtgaccaaacagttcggaatccagcagattttcatttaacgccgcgcagttaagggaaataaacggcccttgccaacgggaggagagataatgcaggcggctggcaatcagctctttaccggtgccgcgttcgccgatgatgagcaccggtttgtccagcggtgcgagatggctaacctgttccagcacttcgagaaagctgttcgcctcaccaagtaaattatctttgtattctgccatgatgaaattcgccacttgttagtgtaattcgctaactcatcctggcatgttgctgttgattcttcaatcagatctttataaatcaaaaagataaaaaattggcacgcaaattgtattaacagttcagcaggacaatcctgaacgcagaaatcaagaggacaacattatgggtattttttctcgctttgccgacatcgtgaatgccaacatcaacgctctgttagagaaagcggaagatccacagaaactggttcgtctgatgatccaggagatggaagatacactggttgaagtacgttctactagcgcgcgcgcgttggcagaaaagaaacagctgactcgccgtattgaacaagcgagcgcgcgtgaggttgaatggcaggaaaaagccgaactggcgctgctgaaagagagagaggatctggcacgtgcagcgttaattgaaaaacagaaactgaccgatctgattaagtccctggaacatgaagtgacgctggtggacgatacgctggcacgcatgaagaaagagattggcgagctggaaaacaaattgagcgaaacacgcgctcgccagcaggcattgatgttacgtcatcaggcggcaaacagcagccgcgatgtgcgtcgtcagctggacagtggcaaactggatgaagcaatggctcgtttcgaatctttcgaacgtcgtattgaccagatggaagcggaagcagaaagccacagcttcggtaaacaaaaaagcctggacgatcagtttgccgaactgaaagccgatgatgcaatcagcgaacaactggcacaattaaaagccaaaatgaagcaagacaatcaataataacatccaggcggcgtccgaacgcgccgccgctcatcgtctaaggagtacttatgagcgcgctatttctggctattccgttaaccatttttgtgctgtttgttttaccgatctggttatggctgcattacagcaatcgttctggtcgcagtgaattgagccaaagtgagcagcagcgattagcgcaactggctgatgaagcaaaacggatgcgcgaacgtattcaggcgctggaatctattcttgatgcagaacatccgaactggagggatcgctaatggcgggcattaatctcaataaaaaattatggcgtattccacagcagggcatggtccgcggcgtctgcgccgggattgccaactattttgatgtaccggtaaaactggtgcgtatcctggtggtgctgagcattttcttcggtctggcgctgtttaccctggttgcttacatcattttgagttttgcgcttgatccaatgccggacaacatggcctttggtgagcagctaccttccagcagcgaattgctggatgaagtcgaccgtgaactggcggcaagtgaaacgcgtttacgcgagatggaacgttatgtcacttccgatactttcacgttacgtagccgtttccgtcaactgtgaggaaagttatgaatactcgctggcaacaggccgggcaaaaggtaaagcctggtttcaaattagcaggcaagctggtacttcttaccgcactgcgctatggcccggcgggtgtggcgggctgggcgataaaaagtgttgctcgccgaccgctgaaaatgttgctggctgtggcgctggaaccgctgttaagtcgggctgctaataaactggcacagcgttataaaaggtgaggggagtttcgcaaaaattgttaaatctcaggcgtataatggatggcaattttcatccatagaaggacgcttacatgtttaaaaaaggcttacttgctctggcactggtgtttagtctgcccgttttcgccgctgaacactggatcgatgttcgtgttccagagcagtatcagcaagagcacgttcagggggccatcaatattcccctgaaggaagtgaaagagcgcattgccaccgccgttccggataaaaacgacaccgtgaaagtgtattgcaatgccggacgccagagtgggcaagcaaaagagatccttagcgagatgggatatacccacgttgagaacgccggtggcctgaaagacatcgcaatgccgaaggtcaaaggttaaaagaattcaccatgagcggcgcttatgcgccgtttttttttctgtcacaccttatttacatccccatagattatttgcgtcagctcacaaatacgctttttccctggtaaaaaatgatttcctgcgtgactaaaacccttgtgctcaattgacagtttattttctgcggagtagtctctcgtttcatgggaccgctaccacggaaaggcaacatgaaacagaaaattacggattacctggacgaaatctacggtggaacatttaccgcaactcatttacagaaacttgtaacgcgtcttgagagtgcgaaacgattaattacacagcgacgtaaaaaacactgggatgaaagtgatgtcgtgttaattacctatgccgatcaatttcacagcaatgatttaaaaccattacccacatttaatcagttttaccatcaatggctgcaaagcatttttagtcatgttcatttgttgccgttttatccatggagttctgatgatggctttagcgtaattgattatcatcaggtcgccagtgaagcgggggagtggcaggatattcagcaactcggtgaatgcagtcatttaatgtttgattttgtctgcaaccatatgagcgcaaaaagtgaatggtttaaaaactatttacaacagcatccaggttttgaagatttttttattgccgttgacccgcaaaccgatctcagcgccgtcactcgcccgcgtgcgttaccgttattaacgccattccagatgcgcgatcatagtacgcgccatttatggaccacctttagtgacgatcaaattgacctgaattaccgtagccctgaagtgttgctggcgatggtggatgttttactctgttaccttgcgaaaggtgctgagtatgtccgcctggatgccgttggctttatgtggaaagagccgggaacaagctgcatccatctggaaaaaacacatctgattatcaaactgttacggagcattattgataacgttgcgccaggtacagtgatcattaccgagaccaatgttccgcataaagacaacattgcttactttggcgcaggcgatgacgaagcacatatggtgtaccagttcagcctgccgccactggtgctgcatgcggtgcaaaaacagaacgttgaggcgctttgtgcgtgggcgcaaaacctgacactaccttccagcaacaccacctggtttaacttcctcgcctctcacgatggcatcgggctaaacccgctacggggcttgttgcctgaaagcgaaatattagagctggtcgaggcgttacagcaggaaggtgcattagtaaactggaaaaataatcccgacggtacacgcagtccgtatgaaataaatgtgacctatatggatgcgttaagccgccgtgagagtagcgatgaagaacgttgcgccaggtttatccttgcccatgcgattttgttaagtttccccggtgtgccagcgatatatattcaaagtattcttggcagccgtaatgattacgcaggtgtcgaaaaactcggatataaccgtgcgattaaccgtaaaaaatatcacagtaaagagataacccgagaactgaacgatgaagctacattaaggcatgcggtatatcatgagttgagccgtttaattacacttcgtcgcagccataacgagtttcatccggataataattttaccattgatacgattaatagttccgtaatgcgtattccaagaagtaacgctgatggtaattgtctgactggattgtttaatgtcagtaaaaatattcagcatgtaaatattactaatctgcatggtcgggatctgattagtgaagttgatatattgggtaatgaaataacgctgcgcccctggcaggttatgtggattaaataaaaaggaacatctcatgattaaaagtaaaatcgtgctgttaagtgcactggttagttgcgccctgattagtggctgtaaagaagaaaataaaacgaatgtatccatcgaatttatgcattctagcgtggagcaggagcgccaggccgttatcagtaaattgattgcccgttttgaaaaagaaaaccctggcatcaccgttaagcaagtgcccgtggaagaagatgcctataacactaaagtcattactcttagtcgtagcggtagcctgccggaagtgatcgaaaccagccatgactacgccaaagtgatggacaaagagcagcttatcgatcgcaaagcggttgccacagtcatcagcaacgttggtgaaggcgcgttttacgatggcgtactgcgtattgtgcgtaccgaagatggtagcgcatggaccggtgttcctgtcagcgcctggattggcggtatctggtatcgcaaagatgtgctggcaaaagcggggcttgaggagccgaaaaactggcaacagctgctggacgttgcacagaaactgaatgacccggcgaataaaaaatacggcattgcgctgcctacagcagaaagcgtgttgacggaacaatccttctcccagtttgcgttatccaaccaggctaacgtctttaacgccgaaggcaaaatcacccttgatacaccagagatgatgcaggcactgacctattaccgcgaccttactgccaacactatgccgggttctaacgacatcatggaagtgaaagacgcctttatgaacggcaccgcgccgatggcgatttactccacctatatccttccggctgtgattaaagaaggcgacccgaaaaacgtcggtttcgtggtgccaaccgagaaaaactctgcggtctacggcatgttgaccagcctgaccattaccgccgggcaaaagaccgaagagacggaagcagcagaaaaatttgtcacctttatggagcaggcagacaacattgccgactgggtgatgatgagcccaggtgctgcgctgccggtgaataaagcggtggtgactaccgccacctggaaagacaacgacgttattaaggcgctgggtgaactaccgaatcagctaatcggtgaactgccaaatattcaggtttttggcgcagtaggggataaaaactttacccgcatgggtgatgtgacgggttctggcgtggtgagtagtatggtgcataacgtcaccgtgggtaaagccgatctctctactacgctgcaagcgagccagaaaaaactggatgaactgatcgaacagcactaaacccaggacaggaatccgcaatgaacaggctttttagtggtcgttccgatatgccctttgcgctgctgcttctcgcgcccagcttattactgctgggcggtctggtggcgtggccgatggtgagcaatatcgaaatcagttttttacgtctgccgctcaatcccaacatcgagagtacgtttgttggggtgagcaactatgtgcgtatcctctccgatcccggcttctggcatagcctgtggatgacggtctggtataccgcgctggtggtggcgggcagcaccgtgctcgggctggcggtggcgatgtttttcaaccgcgagttccgcctgcgcaaaaccgcgcgtagcctggtgatcctctcctacgtaacgccgtccattagcctggtgttcgcctggaaatacatgttcaacaacggctacggcattgttaactacctcggcgtcgatcttctgcatctctatgagcaggcaccgctgtggttcgataatccgggcagtagctttgtgctggtggtgctgttcgccatctggcgctacttcccgtatgcctttatcagctttctggcgattttgcagaccatcgacaaaagcctgtacgaagcggcagagatggatggcgctaatgcctggcaacggtttcgtatcgtcacgctgcccgcaattatgccggtcctggcgacggtggtgacactgcgcaccatctggatgttctacatgttcgcggatgtttatttgctgacgaccaaggtcgatattctcggtgtatatctctacaaaaccgcctttgcctttaatgatttaggaaaagcggcggcgatcagcgtggtgctcttcatcattattttcgctgtcattctgctgaccaggaaacgggtgaacctcaatggcaacaaataaacgcacactcagtcgcatcggtttttactgcgggctggcgctgtttctcatcatcacgctgtttccattttttgtgatgctgatgaccagcttcaagggcgcgaaagaggcgatcagtctgcatcctacgctgctgccgcagcagtggacgctggagcattacgtcgacatttttaacccgatgattttcccgtttgtcgactacttccgtaacagtctggtggtgtctgtggttagttccgtggtggcggtattcctcggcattcttggggcttacgcgctttcccgcctgcgctttaaaggtcggatgaccatcaacgccagcttttacacggtgtatatgttctctggcattttgctggtggtgccgcttttcaaaatcatcaccgcgcttggcatttacgacactgagatggcgctgatcatcaccatggtgacgcaaactctgcccaccgccgtgtttatgctgaaaagctacttcgacaccatccccgatgagatcgaagaagcggcgatgatggatggcctcaaccgtctgcaaattatcttccgcatcaccgtgccgttggcgatgtccgggctgatatccgtgttcgtctactgctttatggtggcgtggaacgactatctgtttgcgagcattttcctctccagcgccagcaatttcaccttaccggtgggcctgaacgcgctgttcagtacgccagattacatctggggacggatgatggcggccagtctggtgaccgcattgccggtggtgattatgtatgcgcttagcgaacgttttattaagagtggtttgaccgccggtggcgtgaagggctaaagcggccagtttctttacaaggagttttaaatgaaaaagttagtagccacagcaccgcgtgttgctgcgctggttgagtatgaagatcgggcgattttagctaatgaagtgaagatccgcgtgcgtttcggcgcaccgaaacacggaacggaagtggtcgacttccgcgccgccagcccgtttattgatgaagactttaacggcgaatggcagatgttcactccgcgtccggcagatgcgccgcgcggcattgagtttggcaaattccagcttggcaacatggtggttggcgacattatcgagtgcggcagcgacgttaccgactacgcggtgggcgacagcgtatgcggctacggcccgctctccgagacggtcatcattaacgcagtgaataactacaagctgcgcaaaatgccgcaaggcagctcctggaaaaacgccgtctgctacgacccggcgcagtttgccatgagcggcgtgcgcgatgccaacgtgcgcgtaggggattttgtggtggtggtagggcttggcgcaatcggtcaaattgccatccaactggctaaacgcgctggcgcttctgtggtgattggcgtcgatcctatcgcccatcgctgtgatattgcccgtcgccacggcgcggatttctgccttaaccccatcggcactgatgtaggtaaagagatcaaaacgctgaccggcaagcagggtgccgatgtgattatcgaaaccagcggctacgccgacgcgctgcaaagcgcgctccgcggtctggcttatggcggcaccatctcctatgtcgcgtttgccaagccgtttgccgaaggttttaacctcggacgcgaagcgcatttcaataacgccaaaattgtcttctctcgcgcgtgcagcgaaccgaacccggattatccgcgctggagccgcaagcgtattgaagaaacctgttgggaactgctgatgaacggttatctcaattgcgaagatttaatcgacccggtggtgacctttgccaatagcccggaaagctatatgcagtatgtcgaccagcatccggaacagagcatcaaaatgggcgttacgttttaattcaaaggaatgaaaaaaatgaaaatcggcacacagaatcaggcgttctttccggaaaacattctggagaaatttcgttatatcaaagagatgggcttcgatggttttgagattgacggcaaactgctggttaacaacatcgaagaagtcaaagcggcgatcaaagaaaccggtttaccggtgaccaccgcctgcggtggctatgacggatggattggcgactttatcgaagagcgtcgtcttaatggcttaaagcagatcgagcgcattctcgaagcgctggcagaagtgggcggtaaaggcatcgtcgttccggctgcgtggggcatgtttaccttccgcttaccgccgatgaccagcccgcgtagcctggacggcgaccgcaaaatggtgagtgattccctgcgcgtactggaacaggtcgccgcgcgtaccggaaccgtggtgtatctcgaaccgttaaaccgctatcaggatcatatgatcaacaccctcgccgatgcccgccgttacatcgtcgaaaacgatcttaaacatgtacagattatcggcgatttctatcacatgaatatcgaagaagataacctggcgcaggcgctgcatgacaaccgcgacctgctcggtcatgtgcatattgcggataaccatcgctaccagccgggcagcggcaccctggatttccacgcgctgtttgaacagctgcgcgcggataactatcagggctatgtagtgtacgaagggcgtatccgggcggaagatcctgcccaggcgtaccgtgatagcttggcctggttgcgtacctgctaagaggtctttgtgaaaagtgcaatgacaagctctccgctgcgggtcgcgataataggcgcaggccaggtggcggataaggttcatgctagctactactgcacccgcaacgatctggaactggtggctgtctgtgacagccgcctttcccaggcgcaggcgctggcagaaaaatacgggaatgcatccgtgtgggacgatccgcaggccatgctgctggcggtgaaacctgatgtggttagcgtctgcagtcctaaccgttttcattacgaacataccctgatggcactggaagcgggctgccatgtgatgtgcgaaaaaccgcccgccatgacgccagaacaggcgcgggaaatgtgcgataccgcgcgcaaactgggcaaggtgctggcctacgactttcaccatcgttttgcgctcgatacgcaacagctgcgtgaacaggtgaccaacggcgttttgggagagatttacgttaccaccgcccgcgccctgcgtcgctgcggcgttcccggctggggtgtctttaccaataaagaactgcagggtggtggcccgctgatcgacatcggcattcatatgctggatgctgcgatgtatgtgctgggctttccggcggtgaaaagcgtgaatgcgcatagctttcaaaagatcggcacgcaaaagagctgtggtcaatttggtgagtgggatccggcaacttacagcgtcgaagatagcctgtttggcaccattgaatttcataacggcggcattctgtggctggaaacgagttttgcactcaacatccgcgaacagagcattatgaacgtcagcttttgtggtgataaagctggtgcgacgctgtttccagcacatatctacaccgataacaacggtgaattaatgacgctgatgcaacgggaaatagcagacgacaaccgccatttgcgcagcatggaagcctttatcaatcacgtacagggcaagcccgtgatgatagccgacgccgagcaggggtacatcatccagcaactggtggcggcgttgtatcaatccgcagaaacagggacgcgtgtggaattatgaccaggccagtaacgttaagtgaaccccatttcagccagcataccctgaacaagtatgcaagcctgatggcgcaggggaacggctatcttgggcttcgcgccagccatgaagaagattacacgcgccagacgcgaggggtgtatctggcggggctgtatcatcgggcgggaaaaggtgaaatcaacgaactggtgaacctgcctgatgtcgtggggatggagattgccataaatggtgaggttttcagcttatcccacgaagcctggcagcgtgagcttgactttgccagtggcgaattacgccgcaatgttgtctggcgtaccagcaacggcagtggttacaccatcgccagccgtcgctttgttagcgcagaccaactgccgctcattgcgctggaaatcactattacgccactggacgccgacgcgagtgtgctgattagtacaggcattgacgccacgcaaaccaatcacggtcgccaacatctcgacgaaacccaggtgcgggtgtttggtcagcatctgatgcaggggagctacaccacccaggatggacgcagtgatgtggccatcagctgttgctgtaaggtgagcggtgatgtgcagcaatgctataccgccaaagagcgccgtttactgcaacataccagtgcgcagcttcatgcaggcgagacaatgacgttgcaaaaactggtgtggatcgactggcgggatgacaggcaagctgctttagacgagtggggcagcgcgagccttcgccagcttgaaatgtgcgcgcagcagagttacgaccaacttcttgcagcaagtacagaaaactggcgtcaatggtggcagaaacgtcgtatcacggtaaatggcggcgaagcgcacgatcagcaagcgttagattatgcgctttatcatctgcgcatcatgacgcctgcccacgacgagcgcagcagcattgcggcaaaaggcttaaccggcgaaggctacaaaggccacgttttctgggatacagaagtatttttgttaccgtttcatctgtttagcgatccgacggttgcccgaagtttactgcgttatcgctggcacaacttgccaggcgcgcaggagaaagcgcgacgcaacggctggcagggcgcgctatttccgtgggaaagcgcgcgcagcggcgaagaagagacgccggaatttgccgccattaacattcgcaccgggctgcggcaaaaagtggccagcgcgcaggcggaacatcatctggtggccgatatcgcctgggcggttattcaatactggcagaccacgggggatgaaagtttcattgcgcatgaaggcatggcgctacttctggagacggcaaagttctggattagccgcgcggtgagagttaacgatcgtctggaaattcatgatgttattgggccagacgaatataccgaacatgtcaataataatgcatacaccagctatatggcccgctacaacgttcaacaggcgctgaatattgcccgccagttcggctgtagcgacgatgcgtttatccatcgcgccgaaatgttcctcaaagagctatggatgccagaaattcagcccgacggcgttttgccgcaggatgatagctttatggctaagccggcgattaatctggcgaaatacaaagcggcggcggggaagcaaaccatactgctggattatagtcgcgcagaagtgaacgagatgcagatcctcaaacaagctgatgtggtgatgctcaattacatgctgccggagcagttcagtgcggcaagctgtcttgccaatctgcaattttatgaaccgcgcactattcacgacagcagtttaagtaaagcaatccacggcattgttgccgcacgctgtggcctgctgacccaaagttatcagttctggcgcgaggggactgaaatcgatcttggtgctgatccgcatagttgtgatgatggtatccatgctgccgcaactggcgctatctggctgggggcgattcagggttttgccggggtgagcgtgcgtgacggtgaattgcatctcaatccggcgttacctgagcagtggcaacagttgtctttccctctgttctggcagggctgcgaattacaggtcactcttgacgcgcagcgtattgcgattcgaacttctgcgcccgttagtctgcgtttgaacggtcagcttataaccgtggctgaagaatctgttttctgtttgggtgattttattttgcccttcaatgggaccgctaccaaacatcaggaggatgaatgaaactgcaaggggtaattttcgatctggatggtgtaatcaccgataccgcgcatctgcatttccaggcgtggcagcagattgccgctgaaattggcatcagcattgatgcgcagtttaacgaatccctaaaagggatcagccgcgatgagtctctgcggcgcattctgcaacacggggcaaagagggcgactttaacagccaggagagggcgcaactggcgtatcgcaaaaatctgctctatgtccacagtctacgcgagttgacggtcaacgctgttctacccggcattcgctctttgctggcagatctccgtgcacagcagatcagcgttgggctggcttctgtctccctgaatgcgccgacgattttagcggcgctggagctgcgcgagtttttcaccttctgcgcggatgcttcccaacttaaaaacagcaaaccggacccggaaatctttctcgccgcctgtgcagggctgggcgtgccgccgcaggcatgtatcggcattgaagatgcgcaggcgggcattgacgccattaacgccagcggtatgcgcagcgtggggatcggcgcgggcttaaccggggcgcaattactgttgcctagtacggaaagtctcacctggccgcggttaagcgccttctggcaaaacgtataacaaaggaatcaacatggctcagcttagcttacaacatattcaaaaaatctacgataaccaggtgcatgtggtgaaggacttcaacctggaaattgccgataaagagttcatcgtgtttgtcggcccgagcggctgcggtaagagcaccaccctgcgcatgattgccgggcttgaggagatcagcggcggcgatctgttgatcgacggcaaacgaatgaatgacgttccagccaaagcacgcaatatagcgatggtgttccagaactacgcgttgtatccgcatatgacggtttacgacaacatggcgtttggtctgaagatgcaaaaaatcgccaaagaggtgattgatgagcgggtgaactgggcggcgcaaattctcggcctgcgtgagtacctgaaacgtaagccgggggcgctttccggcgggcaacgtcagcgagtggcgcttgggcgggcgattgtacgcgaagcgggcgtgtttttaatggatgaaccgctctctaaccttgatgccaagctgcgcgtgcaaatgcgcgcagagatcagcaagctgcatcagaaactgaacaccaccatgatctacgtgacccacgatcagaccgaagcgatgaccatggcgacgcggattgtgattatgaaagacgggattgttcagcaagtaggtgcgccgaaaaccgtttataaccaacccgcgaatatgtttgtttccggatttattggaagtccagcgatgaattttattcgcggcacgatcgatggcgataaattcgttacggaaacgcttaaattaaccattcccgaagagaaattagcggttctgaaaacacaggaaagtttgcataagcccatcgtgatgggaatacgaccggaagatattcatccggacgcgcaagaggaaaataacatttccgccaaaattagcgtggcagaattaaccggtgcggaatttatgctctacaccacggttgggggcacgagttaaacggttgggggcacgagttagtggtccgtgctggtgcgttaaatgattatcatgcaggagaaaatatcactattcattttgatatgacgaaatgtcatttctttgatgcagaaacggaaatagcaattcgctaaatacagggggaaggcattcccccaggataatacaaggaacaataatgaaaaagttattaccctgtaccgcactggtgatgtgtgcgggaatggcctgcgcacaggccgaggaaaggaacgactggcactttaatatcggcgcgatgtacgaaatagaaaacgtcgagggttatggcgaagatatggatgggctggcggagcctagtgtctattttaatgccgccaacgggccgtggagaattgctctggcctattatcaggaagggccggtagattatagcgcgggtaaacgtggaacgtggtttgatcgcccggagctggaggtgcattatcagttcctcgaaaacgatgatttcagtttcggcctgaccggcggtttccgtaattatggttatcactacgttgatgaaccgggtaaagacacggcgaatatgcagcgctggaaaatcgcgccagactgggatgtgaaactgactgacgatttacgtttcaacggttggttgagcatgtataaatttgccaacgatctgaacactaccggttacgctgatacccgtgtcgaaacggaaacaggtctgcaatataccttcaacgaaacggttgccttgcgagtgaactattatctcgagcgcggcttcaatatggacgacagtcgcaataacggtgagttttccacgcaagaaattcgcgcctatttgccgctgacgctcggcaaccacagcgtgacgccgtatacgcgcattgggctggatcgctggagtaactgggactggcaggatgatattgaacgtgaaggccatgattttaaccgtgtaggtttattttacggttatgatttccagaacggactttccgttagcctggaatacgcgtttgagtggcaggatcacgacgaaggcgacagtgataaattccattatgcaggtgtcggcgtaaattacagcttctgataatgggctaaattgccggatgcggcgcgagtactttatccgatctataaatgtaggccggataagatgcgctagcatcgcatctggcattcaggcaaggtagctggtatttatttcagcgtcatatgcgtggcaacggtaatattctgtggactcggttttccagaaattaagcggaataataactcgcagctttgttgacctaactcctgcgtcggaacatcgatgccgcccggtgcaggcgttaaaataaaactcagcgtttcattgctataacccaccaccgctaactgctgcggaatagcaatatttttctctgctgccgcacgataaatgctcattaatttcaggctgtcagtggcaaacaccgcctcaggcaacggactctggcttaataattgccgtgctgcttttaatgcagtttcatgggtataaccgccatcaacaatccattcatcacgcactgcaatattatgcgcagccaggctctgcttataaccattaacgcgatcaacgctaacatggacatcaagcggagcatgcaggcaggcaatattttgatgcccactttcaattaatgcatcggtcaacgcaatgctgtcgccaaaattatcggtatcgacagaataaacatgggcatattgaccttcaactttgccaatcaccaccaccggaatatcatatttatcgagttgggcaaaaaaactctcatccgctgggctactgagcataataatgcctttaatcattttctgcttaattttgctttcgcatttttgcagatcttctgccggattgtggctcgtttgtaatatcacgtcgaaaccttcttcttcagctttggcggtgatggcatgcaaaacttcagagaaaaacggattacccgccgtagttttggtgctacgggtagaaatcaccataatggcatcaaaaccgctagaggtcagcgcgcgggccagcttgtttggctgatactgtaattcttcaatgacccgtaacactttttcgcgcgcttccggggagatattagtttgcttattcagcacgcgacttacggtggatttacttacgcctgcaaccctggcaatatcataaatagtaggggacataggtcaggaactccgtccgaacgtgaatgctgcacatcttatggagttcgccggtcgatgacaacacgggcagttgataatcaatggcctggcccccacattcatatccttacgaatgattttttttctggtcttcagagcagcacaggacagcaatgaagcgacttaaaaatgaactcaatgcgctggtgaatcggggtgtcgacagacatctgcgcctcgctgtaaccggacttagccgcagcggcaaaacagcgtttatcaccgcgatggttaatcagttgcttaatattcacgccggagcacgtttgccgctgttaagtgcggtgcgtgaagagcgcctgctgggcgtgaaacgcattccccagcgtgactttggcattccgcgcttcacctatgacgaagggctggcgcagttatatggcgatccacccgcctggccaacgccaacgcgcggcgtcagtgaaatccgcctggcgctacgttttaaaagcaatgatagcctgctacgccactttaaggatacctccacgctgtatctggaaattgtggattatcccggcgaatggttgctcgacctgccgatgctggcgcaggactatttaagctggagccgccagatgacgggcttactcaatggtcagcgcggagaatggagcgcgaaatggcgaatgatgagcgaagggctggacccgctagcgcctgccgacgaaaaccggctggcggacattgccgccgcgtggaccgattatctccaccactgtaaagagcaggggctgcactttattcagcctgggcgctttgtcttgccgggagatatggcaggtgcgcccgcgctgcaattcttcccgtggccggatgtcgatacctggggcgagtccaaactggcgcaggccgataagcataccaatgccggaatgctgcgcgagcgctttaattattactgcgagaaggtggtgaaggggttctataagaatcattttctgcgctttgaccgccagattgtgctggtggattgcctgcaacctctcaacagtgggccacaggcatttaatgatatgcgtctggcactgacgcagctgatgcaaagttttcactacgggcagcgtaccctgttccggcgtttgtttagcccggttatcgataagctattgtttgctgccactaaagcggaccatgtgaccatcgatcagcacgctaatatggttagtttactgcaacaactgattcaggatgcctggcaaaatgcggcgttcgaagggatcagcatggactgcctggggctggcgagtgttcaggcgaccaccagcggcattattgatgttaacggtgagaaaatcccggcgctgcgtggtaatcgacttagcgatggcgcaccgctcactgtttatcctggcgaagttcccgcacgtttgcctggtcaggcgttctgggataagcaaggcttccagtttgaggcatttcgtccgcaggtgatggatgtcgacaaaccactaccgcatattcgtcttgatgctgcgctggaatttttaataggagataaattgcgatgaccgaaccgttaaaaccacgtattgatttcgacggtcctctggaggtcgatcagaatcctaaattcagggcgcagcagacctttgacgaaaatcaggcgcaaaattttgccccggccacgctcgacgaagcgcaggaagaagaggggcaagtcgaagcggtaatggacgcagcgttacgtccgaaacgcagcctgtggcgcaaaatggtgatgggagggctggctctgtttggcgcaagcgttgtcgggcagggtgtacagtggacaatgaatgcctggcaaacccaggactgggtggcgctgggtggatgtgccgctggggcattgattatcggcgctggcgtaggttctgcggtaacagagtggcggcgcttatggcgcttgcgacagcgcgcccatgaacgcgacgaagcgcgtgatttattgcatagccacggcacgggcaaaggccgcgcattttgcgaaaaactggcgcagcaggcgggtattgatcagagccatccggcgctgcaacgctggtatgccagtatccatgaaacgcaaaacgaccgtgaagtggtcagcctgtatgcgcatttggtccagccagttttagatgcccaggcgcggcgcgaaatcagccgtagcgcggcggaaagtacgttgatgattgcggtcagcccgctggcgttggtcgatatggcgtttatcgcctggcgcaatctgcgtttaattaatcgcatcgccacgctgtatggcattgaactggggtattacagccgtttgcgtctgtttaagctggtattgctgaatatcgcttttgccggagccagcgaactggtgcgcgaagtggggatggactggatgagccaagatctcgctgctcgtttgtctacccgcgcagctcaggggattggtgcaggacttctgacggcacgactcgggattaaagctatggagctttgccgcccgctgccgtggattgacgatgacaaacctcgcctcggggatttccgtcgtcagcttatcggtcaggtgaaagaaacgctgcaaaaaggcaaaacgcccagcgaaaaataatgcaatatcgggtgctgaccggatatctttacgccgaagtgcccgtttttccgtctttgtgtcaatgattgttgacagaaaccttcctgctatccaaatagtgtcatatcatcatattaattgttcttttttcaggtgaaggttcccatgcgtctggaagtcttttgtgaagaccgactcggtctgacccgcgaattactcgatctactcgtgctaagaggcattgatttacgcggtattgagattgatcccattgggcgaatctacctcaattttgctgaactggagtttgagagtttcagcagtctgatggccgaaatacgccgtattgcgggtgttaccgatgtgcgtactgtcccgtggatgccttccgaacgtgagcatctggcgttgagcgcgttactggaggcgttgcctgaacctgtgctctctgtcgatatgaaaagcaaagtggatatggcgaacccggcgagctgtcagctttttgggcaaaaattggatcgcctgcgcaaccataccgccgcacaattgattaacggctttaattttttacgttggctggaaagcgaaccgcaagatagccataacgagcatgtcgttattaatgggcagaatttcctgatggagattacgcctgtttatcttcaggatgaaaatgatcaacacgtcctgaccggtgcggtggtgatgttgcgaagtacgattcgtatgggccgccagttgcaaaatgtcgccgcccaggacgtcagcgccttcagtcaaattgtcgccgtcagcccgaaaatgaagcatgttgtcgaacaggcgcagaaactggcgatgctaagcgcgccgctgctgattacgggtgacacaggtacaggtaaagatctctttgcctacgcctgccatcaggcaagccccagagcgggcaaaccttacctggcgctgaactgtgcgtctataccggaagatgcggtcgagagtgaactgtttggtcatgctccggaagggaagaaaggattctttgagcaggcgaacggtggtagcgtgctgttggatgaaataggggaaatgagtccacggatgcaggcgaaattactgcgtttccttaatgatggcactttccgtcgggttggcgaagaccatgaggtgcatgtcgatgtgcgggtgatttgcgctacgcagaagaatctggtcgaactggtgcaaaaaggcatgttccgtgaagatctctattatcgtctgaacgtgttgacgctcaatctgccgccgctacgtgactgtccgcaggacatcatgccgttaactgagctgttcgtcgcccgctttgccgacgagcagggcgtgccgcgtccgaaactggccgctgacctgaatactgtacttacgcgttatgcgtggccgggaaatgtgcggcagttaaagaacgctatctatcgcgcactgacacaactggacggttatgagctgcgtccacaggatattttgttgccggattatgacgccgcaacggtagccgtgggcgaagatgcgatggaaggtagcctggacgaaatcaccagccgttttgaacgcagcgtattaacccagctttatcgcaattatcccagcacgcgcaaactggcaaaacgtctcggcgttagtcataccgcgattgccaataagttgcgggaatatggtctgagtcagaagaagaacgaagagtaagcgcgaatatgcctgatggtgcaacaccatcaggcatattaaattatgctttcagtacagccagagctgcttcgtaatccggctcggtggtgatttcatccaccagctggctgaaaatcacattgtcattttcgtcaataaccacaacggcacgcgctgccagacctttcagtgggccatcagcaattgccacaccgtaagcttgcagaaattcagcgttacggaaagtggagagggtgataacgttgttcagaccttctgcgccgcagaaacgagactgggcgaacggcagatcggcagagatacacagcacaacggtgttgtcgatctcagttgccagttggttaaacttacgtacacttgcggcgcaaacaccggtatcaatactcgggaaaatgttcagcactttgcgtttacccgcaaactgaccgagggtgacgtcagacagatcttttgccacgagagtaaaagtctgcgctttgctacccgcctgcgggatggaattggcgactgtaaccgggttgccctggaaatgaacggtttgactcatgattatctttcctgtttacatatagttaacgtcacacctagtttatgctaactgtcaataacacagcaaacgctattacagggtctccttacaacaactgtcaacgcagtttgtaattaaaagattaacccatatctggtgaatgaaacagtgatgaaccttctgccagatcaataaatcagaaaaatttaatgatatgacagaaggatagtgagttatgcggaaaaatcaggcaacgttacgcgtatgaccggcaagctgggccagcgcatcgttattttcgatggtgatgtatttacctttgactgccagcatgccgcttttctggaagcgacccagcagacggctgatggtttctaccgtcaggcccagatagttaccgatatcgccacgagtcatcgtcaggcggaattcacgaggggagaagccgcgttgggcaaaacgacgggacaggttgtagatgaatgcagccagacgttcctcggcatttttcttgctcaacagcaggatcatgtcctgatcgcctttgatttcaccgctcatcagacgcatcatctgctgacgcagattcggcattttaccggacaaatcgtccagcgtttcgaacgggatttcacataccatgctggtttccagcgcctgcgcgaagctcgggtgatggccgctgccgatggcgtcaaatcccaccaggtcgcctgctaaatggaaaccagtgatttgctcgtcgccttgctcagtgatggtataacttttaatcgtaccggagcggatggcataaaggcttttaagttcatcaccagccttaaacagcgtctggcctttctgaataggcttcttccgctcaatgatattatcaagctgatcaagctcatgttcgttgagtgtgaacgggatgcaaagctggctgatgctgcaatcctggcaatggatagcacaaccgccagactgaatgcgccgtataattcgcttttccgggatcataggtctgctcaagccgtaattgatatttgtcaattttaacatctttttagggagcaagtaagtctaagcaaaccttaacagcagagaattccgatattagatgtaaatatatgtctatctatttgaaaacccttaagttgttaagggtaactttacataaaagtgtgaacaagctggcacaaattgtttaatgtttacagcaaaagataaccttcatggcgcaataaccactcttttcgctgaactccgcctgcatatccggtcatggtgccgtttcggccaataacccgatggcaaggtacgacgatgctgatgggattgcttccgtttgccgcaccaacggcacgcgccgcgccaggacggcccaattgctcagccagttggccgtaatgcattacctgcccgcaggggatagtgcgtagtgttttccagacttcgcgctgaaatggcgtcccccccgtagcagtgggaagcgtatcaataatgctaagattaccggcaaaatattcacgaagcttgtcgcttaaaccgcctggattggtggcagaaatgcgctcatagccttctttgcgataatggatgtccagcagctgcaccatgcgttcgctgtactcttcccattcaaccgcccgcaggcgaaattgctcatcgcaaatcacccacagtggacccagtggcgtggcaattttttcttcaagtaatctcagcatccgttctctcttaagacaaacgtgggtaaatacccggacctatcggcagaccgacaagataccacgccagcacatcgcagccatactatgcagaaacaatgctgtcgatggctgcttttgcgtcagactgtgctttcgctgccatttccggaccgtatgcgatcccttcggcgaagacaaatttcacatcggtaatgccgataaagccgaggaacgtggacagatacggcgtcaccaggtccgttggtccatctttgtggatcccgccgcggctggtaataacgatggcttttttacccgttaccagaccttccggaccgttctcggtatagcggaaagtaacgcctgcgcgggcaaccaggtcaaaatagtttttcaactgagtcgagatgttgaagttatacatcggtgccgcaataacgataacgtcgtgggctttcagctcggcaatcaactcatcggaaagtgccagagcttcctgctgacgcggagtcagcggcgcatcgctcggacgcagagcgccaaccagttcgccatccagtaccggaatcggatttgcagccaggtcgcgaacggtgatttcatcagcggagtgcttttcgcgccattgttcaacaaaataatcggacaactgattagactgagagtaccctgccaggatgctggatttaagaactaataccttgctcatggtgtttccttatagatgtttgaatgggcgatgccccgttgcttgttgacactttattcacaatcctgccacagagatagcgcaataaatcgaagcctatgttcgaatttattgaacaacgcatagaaagccgcgatgtggtactctatatctatcatttaaaagaaaattaatcaggcagactactgcccactaacgttatgacagaacaacaaaaattgacctttacggccttgcagcagcggctggattcgctgatgctgcgtgacagactgcgtttttctcgccgtctgcacggcgtgaagaaggttaaaaatcctgatgcacaacaggccattttccaggagatggcgaaagagattgaccaggcggcagggaaagtcctgctgcgtgaagcggcacgaccggaaattacttatcctgacaatttaccggttagtcagaaaaaacaggacattctcgaagcgattcgtgatcaccaggtggtgatcgtcgccggggaaacgggttctggtaaaacgactcagttaccgaaaatctgtatggagctggggcgcgggattaaaggactgatcggccatacccagccgcgtcgtctggcggcaagaacagtggcgagccgtattgcggaagagctgaaaacggagccgggcggttgcatcggttacaaagtgcgtttcagcgatcacgtaagtgataacacgatggtcaagctgatgaccgacggtatcctgctggcggagatccagcaagaccgcctgctgatgcagtacgacactatcattattgacgaagcgcacgaacgcagcctgaatatcgattttttgctcggctatttgaaagagttgctgccgcggcgtcctgacctaaaaatcattatcacttccgcgactatcgacccggaacgctttagccgccactttaataatgcgccgattattgaagtctccggtcggacctatccggtggaagtgcgctatcgcccgattgttgaagaagccgatgacaccgagcgcgatcagttgcaggcgatttttgacgccgtagacgaactgagtcaggaaagccatggcgacattctgatctttatgagcggcgagcgggaaatccgcgataccgccgatgcgctgaacaagctgaacttacgccataccgaaatcttgccgctttatgcgcggcttagcaacagcgaacaaaatagggtattccagagccacagcggacggcgcattgtgctggcgaccaacgtcgcggaaacgagcctgaccgtaccggggattaaatacgttatcgaccccggtacagcgcgtatcagccgctacagctatcgcaccaaagtgcagcgtttgccgattgagccgatttcccaggcgtctgccaatcagcgtaaaggccgctgtggtcgtgtgtccgaagggatctgtattcgtctctattccgaagacgatttcctcagccgcccggagtttaccgatccggagattctgcgtaccaacctggccagcgttattttgcagatgaccgcgctggggctgggcgatatcgctgcgttcccgtttgtcgaagcaccggataaacgcaatatccaggatggcgtgcgtctgctcgaagagctgggcgcgatcaccactgatgaacaggccagcgcctataaactgacgccgctcggtcgccagctcagccagttgcctgtcgacccacgtctggcgcgtatggtgctggaagcgcaaaaacatggctgcgtgcgtgaggcgatgattatcacgtccgcgctctccattcaggatccgcgcgaacgtccgatggacaaacagcaggcaagcgacgaaaaacatcgtcgcttccacgacaaagagtctgactttctcgcgtttgtgaatctgtggaattatcttggcgagcagcaaaaggcgctttcttccaacgccttccgtcgcctgtgtcgtaccgattatctcaactatctgcgcgtgcgcgaatggcaggatatctacacccagttgcgtcaggtggtgaaagaacttggcattccggttaacagcgaaccggcggagtatcgcgaaattcacattgcgttgctgaccggtttactttcccatatcggcatgaaagatgccgataaacaagaatataccggcgcacgtaacgcgcgtttctccatcttccccggttctggtttattcaaaaaaccgcctaaatgggtaatggtggcggaactggtagaaaccagccgcctgtgggggcgcattgctgcgcgtatcgacccggaatgggtggagccagttgctcagcatttgattaaacgcacctacagcgaaccgcactgggaacgggcgcagggcgcggtgatggcaacggaaaaagtcactgtttatggtttgccgattgttgccgcgcgcaaggtcaactacagccagatcgatccggcgttatgtcgtgaactctttattcgccacgcgctggtggaaggtgactggcagacgcgtcacgcattcttccgtgaaaacctgaaactacgggcggaagtagaagagctggaacacaaaagtcgtcgccgcgatattctggttgatgacgaaacgttgtttgagttctacgaccagcgcatcagccacgatgtaatctccgctcgccacttcgacagctggtggaaaaaagtcagccgcgaaacgcctgatttgctcaactttgaaaaaagcatgttgatcaaagagggcgcagaaaaaatcagcaagctggattacccgaacttctggcatcagggcaatctcaagctgcgtttgagctatcagtttgagcccggcgcggatgctgacggtgtgaccgtacatattccgctgccgttacttaaccaggttgaggaaagcgggtttgaatggcagatccccggtctgcgccgcgaactggtgattgctctgattaaaagcttgccgaaaccggtacgccgtaattttgtacccgcgccaaactatgccgaagcgtttttaggccgcgtcaaaccgctggagttaccgttgctcgacagccttgagcgcgagttacggcggatgaccggcgttaccgttgaccgcgaagactggcactgggatcaggtgcccgatcacctgaaaattaccttccgcgtggtggatgacaaaaacaagaagctaaaagaagggcgcagcctacaagatctgaaagatgcgctgaaaggcaaagtgcaggaaacgctatctgcggtggcggatgacggtatcgagcagagcggcttacatatctggagttttggtcagctgccggaaagctacgaacagaagcgtggcaactacaaagtgaaggcgtggccggcgctggtggatgagcgcgacagtgtggcgatcaaactgtttgataacccgctggagcaaaagcaggcaatgtggaacggtcttcgccgtctactgctgctgaatattccaagcccaatcaaatatttacatgaaaagttaccgaacaaagccaagctgggactgtactttaacccgtatggcaaagtgctggagctgatcgacgactgtatctcctgcggtgtggataaattgatcgacgccaatggtggcccggtctggacggaagaaggctttgctgcgctgcatgaaaaagtgcgtgccgaactgaacgacacggtggtggatattgcgaagcaggtcgagcaaatccttacggcagtgttcaatatcaacaaacgtctgaaagggcgggtggatatgaccatggcgctggggctttctgacattaaagcgcagatgggcgggttggtatatcgcggttttgtcactggtaacggcttcaaacggctgggcgacacgctgcgatatttgcaggcgattgaaaaacggctggaaaaactggcggttgatccacatcgcgaccgtgcgcagatgctgaaagtcgaaaacgtccagcaggcgtggcagcaatggatcaacaaactgccgcccgcacgtcgtgaggatgaagacgtgaaagagatccgttggatgatagaagagttgcgcgttagttacttcgctcaacaacttggtacgccttatccgattagtgataagcgtattttgcaggcgatggagcagattagcggttaaccctgctatttgcctgataaagaaaaaacccggtaagcatttagcgccgggttttttattaattctaaaacggtaagggtaaaaattcaggaattcagaaaaatacaattctctgctgcaagatgaataatgtttatctacagcatttccttaaaagatatgtcaggcttgcggagtggcggttaaggacatacgatttcctcctttcagagtgctccgcttctcactattatctcacgcagtattcttaagggaacgataaggaggaaccatgaacattaccccgtttccgacgcttagcccggcaactatagatgccataaatgttatcggacagtggctggcgcaggatgatttctccggtgaggtgccgtatcaggccgattgcgtgatccttgcaggcaatgcggttatgccgactatcgatgcggcatgtaagattgcccgcgatcagcaaattcctttactgattagtggtggtatcggtcacagcacaacttttttgtatagcgccatcgcacagcatccgcactacaacactatccgcaccactggcagagcagaagcgaccatcctggcggatatcgctcatcagttctggcacattccgcatgaaaaaatctggattgaagaccagagtacaaactgcggtgaaaacgcacgctttagcatcgcgctattgaatcaggccgtagaacgagttcatacggctatcgttgttcaggaccccaccatgcagcggcgcacgatggcgacgttccgccgtatgactggggacaatcccgatgcaccacgctggttaagttatcccggattcgttcctcagttaggaaataacgcagacagtgtaatctttattaatcagttacaaggattatggccagttgagcgttatctcagtctactcactggcgagctgccgcgtttacgcgatgatagcgatggctacggtccccgcgggcgagattttatcgttcacgttgattttccggcagaagtcatccatgcatggcaaacgctgaaacatgatgcggtgctcatcgaggcgatggaaagtcgcagcttacgttaaaaattgcccgtttgtgaaccacttgtttgcaaacgggcatgactcctgacttttatttctgccttttattccttttacacttgtttttatgaagcccttcacagaattgtcctttcacgattccgtctctctgatgattgatgttaattaacaatgtattcaccgaaaacaaacatataaatcacaggagtcgcccatgagtgtacccgttcaacatcctatgtatatcgatggacagtttgttacctggcgtggagacgcatggattgatgtggtaaaccctgctacagaggctgtcatttcccgcatacccgatggtcaggccgaggatgcccgtaaggcaatcgatgcagcagaacgtgcacaaccagaatgggaagcgttgcctgctattgaacgcgccagttggttgcgcaaaatctccgccgggatccgcgaacgcgccagtgaaatcagtgcgctgattgttgaagaagggggcaagatccagcagctggctgaagtcgaagtggcttttactgccgactatatcgattacatggcggagtgggcacggcgttacgagggcgagattattcaaagcgatcgtccaggagaaaatattcttttgtttaaacgtgcgcttggtgtgactaccggcattctgccgtggaacttcccgttcttcctcattgcccgcaaaatggctcccgctcttttgaccggtaataccatcgtcattaaacctagtgaatttacgccaaacaatgcgattgcattcgccaaaatcgtcgatgaaataggccttccgcgcggcgtgtttaaccttgtactggggcgtggtgaaaccgttgggcaagaactggcgggtaacccaaaggtcgcaatggtcagtatgacaggcagcgtctctgcaggtgagaagatcatggcgactgcggcgaaaaacatcaccaaagtgtgtctggaattggggggtaaagcaccagctatcgtaatggacgatgccgatcttgaactggcagtcaaagccatcgttgatagtcgcgtcattaatagtgggcaagtgtgtaactgtgcagaacgtgtttatgtacagaaaggcatttatgatcagttcgtcaatcggctgggtgaagcgatgcaggcggttcaatttggtaaccccgctgaacgcaacgacattgcgatggggccgttgattaacgccgcggcgctggaaagggtcgagcaaaaagtggcgcgcgcagtagaagaaggggcgagagtggcgttcggtggcaaagcggtagaggggaaaggatattattatccgccgacattgctgctggatgttcgccaggaaatgagcattatgcatgaggaaacctttggcccggtgctgccagttgtcgcatttgacacgctggaagatgctatcagtatggctaatgacagtgattacggcctgaccagtagtatctatacccaaaatctgaacgtcgcgatgaaagccattaaagggctgaagtttggtgaaacttacatcaaccgtgaaaacttcgaagctatgcaaggcttccacgccggatggcgtaaatccggtattggcggcgcagatggtaaacatggcttgcatgaatatctgcagacccaggtggtttatttacagtcttaatgagtgaaagaggcggaggttttttcctccgcctgtgcgcgtcagagtttagcgaatttttcgagggtgcgaataagctgtgtgacgaagccatattcgttatcgtaccaggcgaccgttttcaccagttgtaaatcgcccacggcggtaatttccgtttgcgtggcatcaaacaccgaaccgaaatggctgccaatgatatcggaagagactatttcttcatcggtataaccaaatgactcgttattggtggttgcttgtttaagtgcgttattcacctcttcggcagtcacttttttccgagaatcgataccagttcagtgaccgaacctgttttcaccggcacgcgttgcgcatgacctttcagtttgccgctcagttccgggatcaccagaccaatggcttttgccgcccccgtagtgtggggaatgatattttctgccgctgcgcgtgaagcacgtaaatctttaccacgcgggccatccaccagtgactgggtgccagtataggcatgaatggtcgtcatcgtgccgacttctatcccgaaactgtcatgcaaggctttggccatcggcgcaagacagttagtggtgcatgacgccacggaaacaatggtgtcgttgccatccagagtgtcgtcattgacgttataaacgatagttttcatttcaccggcaggggcggaaatcaacaccttcttcgcaccagcatcaagatgcgcctgcgatttctcggcggaggtataaaagccagtacattcgacaatgatttctgcacctttcgctttccacggaatatttttagcctctttttcggcgtaaaccgcgatacttttcccatcaacgataagtgaatcttccgtaaaatcaacgctccaggggaatggtccgtagtttgaatcatgtttcagcaggtaggcgagaatttatggggaagtgagatcattaatagcgacaacgtctatgttgcttttgacttcaagtaatcgacccaacaccagtcgaccgatacgaccaaaaccgttaataccaactttactcatggttttctcctgtcaggaacgttcggatgaaaattgatcctttccaagcttagaccaggatggcgggatgggcaatctccattctcacagtgaaacgtaacgtactgaaaacgggtgaacaatatttaatgaaattttgagaaaagcccgttatgttaacggaaaattatgttaaagcaggaaatgttatggaaaataaatatagtaggttacaaatcagcattcactggctggtctttttactggttatcgcagcgtattgcgcaatggagtttcgtggtttcttcccacgtagcgatcggccactcatcaacatgattcatgtttcctgtggcatcagtattctcgtgctgatggtcgttcgtcttttgttaaggctgaaatacccaaccccgccgattatacctaagccaaaaccgatgatgacgggactggcgcatttgggacatttggtgatttatctcctgtttattgcgctgccagtgattggtttggtgatgatgtataaccggggcaacccgtggtttgcgtttggtttgacgatgccttacgctagtgaggccaatttcgaacgggtagatagcttaaagagctggcatgaaacgctggcgaatctgggatattttgttatcgggttgcacgctgcggctgcactggcacaccactatttctggaaggacaacacacttctacgcatgatgccgcgtaaacgttcctgaaggatatttaaagaaaacgcctgtactaaaaccgacccgtggtacaggcgaagaatacgggtctacatcggaagcgcctattatatttatttgtatgataaataaaaccataatccttgcccatacgtccatctggcttatttttaatcaattcacccgatctttgatctcatcaacggtatcaaaataaaccagcgtataacgttcaaatcgaacataagattcgataaaccatggaggttatatgaaaaaactggcacttattttgtttatgggaacgcttgtttccttttatgccgatgccgggcgcaaaccctgttctggtagcaaaggggggatcagtcactgtacggcaggcggcaaatttgtctgtaatgatggttctattagtgcaagcaaaaaaacatgcactaactgaagtgtaaaaggggtgccatgagaaaatgaatctgctagtcaaatgcgcggggaaaatccccgcgcttgcccttacctggacgtgcaggccatgagcgcagcaacctccttatcaccgtcccggaaccgcagttcgtagagcgtttgtcgggtcaggagtgtgaatgtcagaatcgtaatgcagataatgagcagacacaccaccagagggttgtgcttcatagcctttctccttgccggatggcgggtaagaggctaagatctgaattgctaggttcattcgttggcctcggttgatagaaatatcggtcggggccttcgtctttctgattcccggttagcctgaaaacagaaagtctcaggcacccgcaggcatcctatgaggtttccttagggacgaaaataatcacttcacgaaattgcgtgctgttttccagaatttttcgtcattcgggttagccagtttagccattcgttactctcttcattccaatagcattaattttctatgcaataattgttgtaaaaatgtgacgcaaagaggtttttggtcataagtaattaccgtcaagtgccgatgactttctatcaggagtaaacctggacgagagacaacggtaatgaatacaactcccagtcagcgattaggttttttgcatcacatcaggttggttccgttatttgcctgcattctaggcggtatcttagttctattcgcattaagtagtgccctggctggctatttcctctggcaggccgatcgcgatcagcgtgatgttactgcggagattgagattcggaccgggttagcgaacagtagtgattttttgcgtagtgcccggatcaatatgattcaggccggggctgcgagtcgtattgcggaaatggaagcaatgaagcgaaatattgcgcaagccgaaagcgagattaaacagagccagcaaggttatcgtgcttatcagaatcgaccggtgaaaacacctgctgatgaagccctcgacactgaattaaatcaacgctttcaggcttatatcacgggtatgcaacctatgttgaaatatgccaaaaatggcatgtttgaagcgattatcaatcatgaaagtgagcagatccgaccgctggataatgcttataccgatattttgaacaaagccgttaagatacgtagcaccagagccaaccaactggcggaactggcccatcagcgcacccgcctgggtgggatgttcatgattggcgcgtttgtgcttgccctggtcatgacgctgataacatttatggtgctacgtcggatcgtcattcgtccactgcaacatgccgcacaacggattgaaaaaatcgccagtggcgatctgacgatgaatgatgaaccggcgggtcgtaatgaaatcggtcgcttaagtcgtcatttacagcaaatgcagcatagtctggggatgacagtagggactgttcgacagggcgcggaagagatttatcgtggcaccagcgaaattagtgctggcaatgcggacctgagttctcgcaccgaagaacaagcggcggctatcgaacaaactgccgccagcatggagcaactcactgcgacggtgaaacagaatgcggataacgcgcatcatgccagcaaactggcgcaagaggcttctattaaagccagcgatggcgggcagacggtttccggtgtagtaaaaacgatgggcgctatctccacgagtagcaagaaaatttctgagatcaccgccgtcatcaacagtattgctttccagacgaatattctggcactgaatgctgccgttgaagccgcgcgagcgggtgagcaagggcgtggatttgccgttgtcgccagcgaagtacggacactcgcaagtcgcagcgctcaggcggcgaaagagattgaaggcttgatcagtgaaagtgtcaggttaattgacctggggagcgatgaggtggcaacggccgggaaaaccatgagcactattgttgatgccgtcgcgagtgtcacacatatcatgcaggaaatcgccgccgccagcgatgaacaaagtagaggcataacgcaggttagccaggcgatttctgaaatggataaggtgacgcaacagaatgcttctctggtagaagaggccagtgcggcggcggtgtcccttgaagaacaggcggcacgattaactgaggcggtggatgtattccgtctgcacaaacattctgtgagcgcagaacctcgcggagcgggtgaaccagttagtttcgctacggtgtgaaaatgttcaaggagggatcgacagatcccttcacctttcagaacggcatactttttcgaatagcgttaatcatcaactggcaaccagaagagaacgtcgcatctacgcgggtcagtattccaatcggttcgcctgcaccatgtcccggaacaggcagggccaccagcgtggcatgacgcaggtcgtcttttacagcgccagaagggacaaaccacacgtaatcgtattcaaccgtaagttgacgagataggctagcagacagcgtttcgatacaaccgctaggaattttacagccctggctctgcactaatgcatcactatgctggcgtggcgcagtgccttctggacttacaacgaccggccattccagcacccggcttagcgttacgttctcctgaagtagcgggtgattagggcggacaaccagcttcaagctttcaagaaacagcagttcgtaattaagcccggtcatcagttcaggatcactcatccgaccaatgccgatatcgatttccccggtttttaaacccgccagaatcatagggttactcattgtcgcaacttgcaaggtcgtctctttttgttgctgatgaaactgacctataacgctaggtaatatccccagtgccgcagtaggtagtgcaccaaccctgacgacatcattattaagaccttctttacgatgaaggctccgtccggcagtgttgatggcgtcaagaactctgactgcatgcgttaaaaattgttcgccgggtaaggtaagttgcgccccctgacgaccacgctcaaacaagcgagcgccagtcagctgctccagttcattcaatgtcttagagagcgcaggttgactcaaattaagggtttcagccgcgcgccccaaagttccttgttgtgcgacagctacgaatgtatgaaggtggcgcaaacggatgcgctgactaaacagactatttttttccataagcgatgttaaaaacgaagcggtgtcgctgacaagtgaagttgtttgattatgataacttgattgcaaaatattattaacaattaaagcaattatgttacagcaaaatggataatattgatgttttcgcggcgagatcacagtttgtaaattcttcccgcaagagtgaatgcggttacctacactccagattactgaccactggaggcagacactatggcgaacagcatcacggcggatgagattcgggaacagtttagccaggcaatgagtgccatgtaccagcaagaagttccgcaatatggcacgctgctggaactggtagctgatgtgaatctggctgtgctggaaaacaatcctcaactgcacgaaaaaatggtaaatgcagacgagctggcgcgactgaatgttgaacgtcatggggcgattcgcgttgggactgcacaagagcttgctactcttcggcggatgtttgccattatggggatgtacccggtgagctattacgatctcagccaggcaggggtgccggtacatagcacagcatttcggcccattgatgatgcttctctggcgcgtaatcccttccgcgtttttacctccttactccgccttgagcttatcgagaacgaaattttgcgccagaaagcggcggagattctgcgtcagcgcgatatcttcaccccacgttgtcgacaactgttagaggaatatgagcagcagggcggctttaacgaaacacaggcacaggagtttgtgcaggaagccctggaaacgtttcgctggcaccagagtgcaacggtagatgaagaaacctatcgcgcattgcacaacgaacatcggttgattgctgatgtggtctgttttcctggatgccatatcaaccacctgacgccacgtacgctggatattgaccgggtgcagagcatgatgcctgaatgcggaattgaacccaaaattctcatcgaggggccgccgcgccgcgaggtaccgattttactacgccagaccagctttaaagcactggaagagacggtgttgtttgcggggcagaaacagggcacgcataccgcgcgctttggtgaaattgagcagcgtggcgtggcattaacgccgaaagggcgacaactgtatgatgatcttctgcgtaacgctggaaccgggcaggataatctcactcaccaaatgcatttacaggaaaccttccgcacttttcctgacagtgagtttttaatgcgtcagcaagggttggcatggttccggtaccgtctgacgcctagcggtgaggcgcatcgtcaggcgattcatcctggagacgatccacagcccttaattgaacgtggttgggtagtggcgcaacccatcacctatgaagatttcttgcccgttagcgcggcggggatcttccagagtaatctgggtaatgaaacgcagacacgcagtcacggtaatgccagtcgcgaagcatttgagcaggcgttgggttgtccggttttggatgagttccagctttaccaggaagcggaagaacgcagtaaacgtcgctgtggtttgctttaaaatctgaccatccgcctttgcaaaaatttgcctgattttacaaacgaatcaggctcatcccatcgacataaaaaaaatgccgatttatgcatattctctcagttcaacaattggattattaataaatattgtctagagtgagcggtcataaataagcactttcttgccgctgaaaacgaccagcgcgggaccattcacaacaccagaaggactcactttcaggtatggatcgtagacgatttattaaaggttcaatggctatggccgccgtgtgcggtaccagcggcattgcttctcttttttctcaggcggcattcgcggcagattctgatattgccgacgggcaaacccagcgttttgacttctccattctacagagtatggcgcacgacttagcgcaaacagcgtggcgtggtgcgcctcgtccgttacctgacacgctggcgacaatgacgccgcaggcttataacagtattcaatacgacgccgaaaaaagcctctggcataacgttgagaaccgtcaactggacgctcagttcttccatatgggaatgggattccgtcgccgcgttcgtatgttttctgtagatccagcaacacatctggcgcgtgaaattcactttcgcccggagttgttcaaatacaacgatgcaggtgttgatacaaaacaattagaagggcaaagcgatctcggctttgccggttttcgcgtgtttaaagcccccgaactggcgcgccgtgatgtagtaagttttctcggcgcgagttatttccgcgccgttgatgatacatatcaatacggtttgagcgcccgcggcctggcgatcgacacttacaccgacagtaaagaagagttccccgactttaccgccttctggtttgatacggtaaaaccgggggcaactacctttaccgtttatgcgttgctcgatagcgccagcattactggtgcctataagttcactatccattgtgagaaaagtcaggtgattatggatgtggaaaatcacctgtatgcgcgcaaagacattaaacagctgggcattgcgccgatgaccagtatgttcagctgcggtactaatgaacgtcggatgtgcgatacaattcatccgcaaattcatgactctgatcgtctgtccatgtggcggggcaacggcgagtggatttgccgtccgctgaataatccgcaaaaattgcagttcaatgcttacaccgacaacaacccgaaagggtttggtttattgcaactggatcgtgacttctcccattatcaggacattatgggctggtataacaaacgcccaagtctgtgggtggaaccgcgtaacaagtggggtaagggcaccatcggcctgatggaaatcccaacaacgggcgaaacgctggataacattgtctgcttctggcagccagaaaaagctgtaaaagcaggtgatgagtttgcattccagtatcgtctgtactggagtgcgcaaccgcctgttcattgcccattagcgcgcgttatggcgacgcgtaccggcatgggcggtttcagcgaaggttgggcgccaggtgaacactatcccgaaaaatgggcgcgtcgttttgccgtcgatttcgttggtggtgatctgaaagctgccgcgccaaaaggcattgagccggtgattacgctttccagtggggaagcgaagcaaatcgaaattctctatattgaacccatcgatggttatcgtattcagtttgactggtatccgactagcgactccactgatccggtcgatatgcggatgtatctacgttgtcagggggacgctatcagtgaaacatggctgtatcagtatttcccgccagcgccggataaacgtcagtatgttgacgaccgcgtgatgagttaatcgttttttcttcggcaccttcttcgggaggtgccgtctggttaaacacgatcccgctcgcatttttccctaagttaaatgagtaatctgatggtgtgtatttcagatacaccttgtcagccactaacagggagtgcgtatgtttccagaataccgagatttaatatcccgtctgaaaaacgaaaatcctcgctttatgtccttgttcgataaacacaataaacttgatcatgaaattgccagaaaggaaggttccgacggtcgagggtacaatgcggaagtggtccgcatgaaaaaacaaaagctacagttaaaagatgagatgctcaaaatcctgcagcaggagagcgtcaaagaggtgtaaactttcctaagccgccagccaggcggcttttttaacaactgcatggattgactggagataagatgactgaaacgataaaagtaagcgaaagtcttgaattacatgctgttgcagaaaatcacgtcaaacctctttatcagttaatctgtaaaaataaaacctggttacagcagagcctaaactggccgcagtttgttcaaagtgaagaggacacgcgaaaaacggtgcagggtaatgtgatgttgcatcaacgcggctatgccaaaatgttcatgattttcaaagaagatgaacttatcggcgttatcagctttaatcgtattgaaccactgaataaaaccgctgaaatgggctactggctggacgaatctcatcaggggcaggggatcatttctcaggcgctgcaggcattgattcatcattacgcccagtctggtgaacttagacgcttcgtgatcaaatgtcgggtggacaatccgcaaagcaaccaggtcgctttgcgcaatggttttatccttgaaggttgcctgaaacaggctgagttcctgaatgatgcctatgatgatgtgaacttatacgcgcgtattatcgatagtcaataatcacaataaccctgccagcggcgttcgcgtaatgcgctcctcgccgttaatgacttttggaccacggacatgaaccgtgtcgccatcaaaggcttcaacgacggcgtggtcggttaactccacatggttttcaattatcaccgcacctgtaatacggctctcaccttgtatgacaacgtgctcgtcgagcagaatcggtccgccacgtaccacggcatttccgccaaccaagacatgatgttttaacacacaattaccttccacaatggcatattccgccacctggctactgtaatgaatcgtcggaatggcatcttcttctatgccagctttcacctgcgcgtgaccgtagactttagcgcaatcgcatagccagacattgttctcttcattaccttcaatactggcaaaatcaaaaacttcggcgcgatgttcaataaaagcataccggacgacggcatcgccataaatttgtgcctggtggacaatacggctggcgctaacccttgcgcgatcataaatttggagcaggagttgatggtcgggcgttaagccttgtgcggcgacgatcatagaatgttgatcaattaaggcgtgaccaaatattctacattgcccgtaaactaaactgtcatgaatggtgacgctgtcacttatatatgcaccctggctgatttcactattatcgatccagacgttatccgttgcgtaaacctctccccacagcacgctggtgccggtgatacgcgtattaccggaaatcaccgctccgccgaacgcaatagcattctggtcgtaaatccagcaatttccttcttgtgctaacaccgtttcgcgatcgatccagccgccagcggttcctgctatcacatcgttaaaatcgctaatggcgataatctgccgtaataacacattttttttagtgccatcttcctgataactaaaggctcgctgttcttcacttagacgatatttgcgcatagcgttttcccacaggtgacttactataaccgtagcaaattctgcggctctggctatgctcgagaaaattccataaaatgcatttcaaatatactttataaattaaacaaaatgagtaagaagatgcagagcgataaagtgctcaatttgccggcaggctactttggtattgtgttggggacgatagggatgggatttgcctggcgctatgccagccaggtttggcaggtcagtcactggttaggggatgggctggtgattctggcgatgatcatctggggattattgactagcgcatttattgcccgactcatacgctttccgcatagcgtgctggcggaagttcgccatccagtgctgagcagttttgtgagtttgtttccggcaacgacgatgctggtggcgattggttttgttccgtggtttcgcccactggcggtgtgcctgttcagttttggtgtcgtggttcagttggcttatgccgcctggcaaactgcgggattatggcgcggatctcaccctgaagaagctaccacgcctggactgtatctgccgacagttgccaacaactttatcagcgcaatggcctgtggtgcgttgggctacaccgacgccggtctggtgtttttaggcgcaggcgttttcagttggctaagccttgaaccggtgatcttgcagcgtctgcgcagtagcggagaattacccacggcactgcggacaagtctcggcattcagctcgctcctgcgctggtggcttgtagtgcctggctgagcgtcaacggcggcgagggtgacacgctggcgaaaatgcttttcggttatggactgctgcaactgctgtttatgctacgtctgatgccatggtatctctcccagccatttaatgctagtttctggagtttcagcttcggcgtatctgcactggcaaccaccggtttgcatctggggagtggcagcgataatggatttttccatacgctggcggtgccgctgtttatctttaccaattttattattgcaatactgctcatccgtacttttgcgcttctgatgcagggaaaattgttagtcagaaccgagcgcgccgttttaatgaaagcagaggacaaagaatgatcattcgtgacgaaaactattttactgataaatatgaattaacccgcacacactctgaagtactggaagcggtgaaagtggttaaaccgggtaaaacgctggatctgggctgtggcaatggtcgtaacagtctttacctggcagccaatggttatgatgttgacgcatgggataaaaatgccatgagtatcgccaacgtcgagcgcattaaatccattgaaaatctggataatttacacacccgagtcgttgatctgaataacctcacatttgatagacagtacgattttattcttagcactgtggtgctgatgttccttgaggctaaaaccatccccgggttgattgccaatatgcaacgttgcactaaacctggtggttacaacctgattgtggcggcgatggataccgctgattatccatgtaccgtcggcttcccgtttgccttcaaagagggagaattacgtcgatattacgaaggctgggagagggtgaaatacaatgaagacgtcggcgagctgcaccgcaccgacgccaacggtaatcgtattaaactgcgtttcgccacgatgctggcacgtaaaaaatgacccggtaagcacaaaacgcgtgaaaattccccacgctgagatgatttactgttcttcttttcggtaagcatattttttatcgaagggatgtgaaattaatcacagtagtcgaagtttttagcagcttaacttactgaaatttaagtactgatgattgacttagcccctttttcggcattgactatgtcgtctgaaaaggggctgaaaaatttattttcaccaacactttttttgccacaacacgaagcggcgctttttgctataacttagaaagtaatataatcatctcaggaaactattcatgcgtaccacaagttttgcgaaagttgcagctttatgcggcttattggctctgtctggttgtgcatctaaaatcacccagccagataaatattctggttttttaaacaattactctgatttaaaagaaacaaccagcgctacaggtaaacctgttttacgttgggtagacccgagttttgatcaaagcaaatatgacagcatcgtctggaacccaatcacttattatccggtaccgaaaccgagcacccaggtagggcagaaagttctggataaaattttgaactataccaacaccgaaatgaaagaagcgatagcgcagcgtaaaccactggttaccaccgctgggccgcgtagtctgattttccgtggggccattaccggtgtagataccagcaaagaagggctgcaattctatgaagtggttcctgttgcattagtggttgcggggacgcaaatggctacaggccaccgtaccatggatactcgcctctattttgaaggtgagctgattgatgcagcgactaataaaccggttatcaaagtcgttcgtcagggcgaaggtaaagacctgaataacgaaagtacgccaatggctttcgaaaatattaaacaagttattgatgacatggcgaccgatgccaccatgtttgacgttaacaaaaagtaattccagacgcgccatcgttagatggcgctttttatccggtgcgccgtaaaaccccatccttcagggcggggatataaggcgcggttttccacctgaccaggtgtttgctgttgttcaatgtattggcggatgacggatattggcgcacctccgcagctactggcaaaatagccaggactccacaaaacgcctttgtagtaatacctgaatgcaatatctggtcgatctcgtcgcagtcacctacccgatacgcctttgaggctgtttaccagactggatatcgccagtttgggaggatagttaattaacaaatggacgtgatctggttcgccatccatttcaaccagttcagcttcaaaatcagcacatacatttgaaaagtaagtgcgtagtttttctgtcgcgtcatggtcaaaaatctggcgtcggtatctggtgacaaagagcaggtgaacatgcatcaggaaaacacaatgccttccacgccggatatcggtttcttttttcacagaccaaagtatcatttgacctgtgaaacgattacaggcatttaaattccagttaagacccggtggtcaacaggagtgtgaaatgaggcgcttcgcaggcgcatgtcgtttcgttttcaatcgtgctctggcacgtcagaatgagaatcatgaggccggtaataaatacatcccttacgggaaaatggcttcctggctggttgagtggaaaaatgccactgaaacgcaatggcttaaagattctcccagtcagccattgcaacagagtctgaaagaccttgagcgggcttacaaaaacttcttccggaagcgggctgcttttccccgattcaaaaagcggggacagaatgatgcattccgctacccgcagggcgttaagctcgatcaggaaaacagccgtatttttctgccgaaactgggctggatgcgctaccggaacagccgtcaggtcacgggtgttgtgaaaaatgtcactgtcagccagtcctgcggtaagtggtacatcagtattcagacagaaagtgaagtaagtactccggttcaccctagtgcaagtatggtcgggctggatgctggcgtggctaaactcgccacgctgagtgatggcacagtctttgagcctgtaaacagttttcagaaaaaccagaagaagctggcgagacttcagcgacagttaagccgcaaggtcaaattcagcaacaactggcaaaagcagaaacgcaaaatacagcgactgcattcctgtatcgcaaatatccgcagggactaccttcacaaagtcacaacggccgtcagcaaaaaccacgcaatgatagtcattgaggatttgaaggtcagcaacatgagtaagagtgcagcgggtacggtcagccagccggggcgcaatgtccgggcaaaaagtggtttaaaccgtagcatactggatcagggctggtatgaaatgcgccgccagcttgcgtataagcagctctggcgtggcggtcaggtgcttgctgttccgccagcgtatacaagccagcgttgcgcgtactgtggtcatacagcgaaagagaaccgcctgagtcaaagtaaattcagatgccaggtatgtggatatacagcgaacgccgatgtaaatggcgctcgcaacattttagcggcggggcacgccgttcttgcctgtggagagatggtgcagagtggccgcccgttgaagcaggaacccaccgaaatgattcaggcgacagcctgaacgtagcagggatccacgtccttcagggcgtggaggatgtcaatatcggtttctgtcagcgattaaattcaacaccacgtaacaaacgcctccggcaattaatccccaaaacgcagaaccaatcccgaccagcgtcaatccacttgccgttaccagaaatgccaccaccgccgcgtctcgctcacgctcattatgcagcgcctgatacaaactgccgccgatggtacttaacagcgccagacctgccagcatctggatccaacttacgggcagggcagccatcatcccggtaatggcactaccaaacagacctgcgagcaaatagaaaatgcctgcaacggcagcggccagccaacgttgatctttatccggatgcgcttccgggctttggcaaatagccgcggtgattgccgcaataccgacggaataaacgccgaaaggggaaaaaaccagtgccagcaatccagtaaatacaattaatgggctaacaggagcgctatatccagctgctttcattgctgcgatacccggtgcgttttggcttgccatcgtcaccagaaaaagggggagtgcaacgctcaggctgtgagcaaagctaaaatcaggggtaatataagtggggagaacgggtttaaagacaacatcagttgtgacaacgtcaccttgcgcgatgacgatcacgatcccaataatcatcgcggcaattaccgcatagcgcggcgcaacggccttggttgccagccataccagcaacatacttccacacaacgtaaattgaccgtccagactggcaaacgcctgtaaaccaaagcgtaataaaatcccggcaagcattgccgccgcaaggctgtgcggaataatgcgcatcagacgagcaaagagtcccgttatgccgcagaggactattagcgcgttggtgacaataaaaacgccgatggcttcgttaagtgttagtccctgcaatccggtgaccaacaaagccgcgccaggcgtactccatgcggtgagaacaggtacgcgataccataatgtcagagtcagcgtactgacgcccattgccagccccagcgccgtcatccagccagagatttgtgcagtggtggctccggcgacaatcgctgcttgccagattattgccgcactactggcgtagccaattaataccgccagaaaccccgccagtagcgtgggtggaggaatagaaaacagacgcatagtcacctcgtgcgttatagcgtacaggcaccgtagcatttgtccgttataacgcacaagtgataaacttccgttttgccggaggagtcgcatggaaaatctcgctcgctttttatccaccacacttaaacaactacgccagcagcgcggctggagtcttagccgactggcagaagcgacgggcgtttctaaagcaatgttagggcagattgagcgtaatgagtccagtccgacggtcgcgacattatggaaaattgccaccgggttgaacgtaccatttagtacatttatttctccgccgcagtccgctacgcctagtgtttatgatccacaacagtaggcgatggtgatcactagcctgtttccttatgatccacaactctgctttgaacacttcagcattcagatggcatctggtgcaataagcgaaagcacgccccatgagaagggggtaatcgaacatgtcgtcgtcattgatggacaacttgatctgtgcgttgatggggaatggcagacccttaattgtggggaaggcgttcgatttgctgcagacgtcacgcatatctatcgtaatggtggggagcaaaccgtacattttcattccctcatccattacccgcgcagttaagcgggaaaactatttcgcaacgtcgcgcttgtggctaaaatagccgccatttttcagctactggataagaatgtgaccgtatcttctcatcgacttgaactgttaagcccggcacgcgatgccgccattgcccgcgaagctattttgcacggtgccgatgctgtttatatcggcggccctggttttggtgcccgtcataatgccagtaatagcttgaaagatattgccgagctggtgccgtttgcccatcgttatggtgcaaaaattttcgtcacgcttaacaccattttgcatgatgatgagctggaacccgcgcaacggctgattactgacctctaccagaccggtgtcgatgcgctgattgttcaggatatggggattctggaacttgatattccgccgattgaactgcacgccagtacgcagtgcgacattcgtacagttgaaaaagcgaagttcctctctgatgttggcttcacgcagattgtgctggcgcgagagctgaatcttgatcagatccgcgcgattcaccaggctacggacgcgaccattgaattctttattcatggggcactgtgcgtggcctatagcggtcagtgctacatttctcatgcgcaaacagggcgtagcgccaaccgtggcgattgcagccaggcgtgccgtttgccatacacattgaaagacgatcaggggcgggtggtttcctatgaaaaacatctgctgagcatgaaagataacgatcagactgccaacctcggcgcgctgattgatgctggtgtacgctccttcaagattgaagggcgttacaaagatatgagctacgtgaagaatatcaccgcccattatcgccagatgcttgatgccattattgaagaacgtggcgatctggcgcgcgctagtagtggtcgtactgaacatttctttgttccaagcacggaaaagactttccaccgtggtagcacagattattttgtgaatgcccgtaaaggcgatattggcgcgttcgatagcccgaaatttatcggcctgccggtaggcgaagtagtgaaagtggcgaaagatcatctcgatgttgccgttaccgagccactggcaaatggcgatggcctgaacgtgttgattaaacgtgaagtcgtcggttttcgtgccaatacggtcgagaaaaccggagaaaatcagtaccgcgtctggcccaatgaaatgccagcagatttgcacaaaattcgtccacatcacccactaaaccgtaatcttgatcataactggcagcaggcactgacaaaaacctccagcgaacgtcgggtggcggtagacattgaactgggcggctggcaggaacaactgattctgaccctcaccagtgaagagggtgtcagcatcacgcatacgctggacgggcagttcgacgaagccaataacgccgaaaaagcaatgaacaatctgaaggatggtctggcaaaactggggcaaaccctctattacgcccgcgatgtgcaaattaatttgccgggggcgctgtttgtaccaaacagtctgttaaaccagttccgccgtgaagctgctgacatgctggatgctgcgcgtcttgccagttaccagcgcggcagccgtaaaccggttgctgatcctgcgccggtttatccgcaaacgcatctgagtttcctcgcgaacgtatacaaccagaaagcgcgtgaattttatcatcgctatggtgtgcagctgattgacgcggcgtatgaagcacatgaagagaagggcgaagtcccggtgatgatcaccaagcattgtctgcgctttgcctttaatctgtgcccgaaacaggcgaaaggcaatatcaaaagctggaaggcgacgccaatgcaactggttaacggcgatgaagtattaacgctaaagtttgattgccgcccatgcgagatgcacgtcattggcaaaatcaaaaatcacatactgaaaatgccgttaccgggaagcgtagtggcatccgtaagtccggatgagctgctgaaaacattgccgaagcgaaaagggtaaaacgccagttttctggttactcacaacttattgaatctgcatgatattgcctgccgggtaaggcgttacgccgcatccggcatcaaatgactcaacgttgtcccgcttctggtttgcggcttttttgccagtaaaaatgctcgcgcaaaccttccgcgctctcttccgccacagcacgcaattcatcgctgtccgcttcatgacgcagctgatgatccacattctttacccacacaaattcatgtcctttgtgccctgccatgagttgtccactaaacagagcacacgttaataagacaacgcttaacgccttcgtaaacatcctgccacctttttcttaccttttgccgctatgatgccgatcgtttcttgaggttattattcagttttgcaaattagcgcaaagaaattctggaatcttccttcctgattttgcattgcattctgccgttgcggcgatttagtgctattttcgagcaaattacacacggaggtaaacactaatgtttactttgttgatatactcagcggcagggaggcgatgtgaaacaaagcgagttcagacgttggctcgaatctcagggcgtcgatgtagcgaatggcagcaaccatttgaaactcaggtttcatgggaggcgcagtgtcatgccgcgtcacccctgcgatgagattaaagaaccattgcgtaaagcaatcctgaaacaactcggtttgagttaatcgccaattaaaaaggttaatgacatgcgagagacagtcgaaattatgcgttatcccgtcactcttacacccgcgccggaaggcggttatatggtttcttttgtggatatccctgaagcgttgacccagggcgaaactgtcgctgaagcgatggaagcggcaaaagatgctttactgaccgcatttgatttttattttgaagataacgagcttatccctttacctagcccattaaatagtcacgatcactttattgaagtacctttgagcgtcgcctctaaggtattgctgttaaatgcttttttacagagtgaaatcactcagcaagagttagccaggcgaattggcaaacctaaacaggagattactcgcctatttaacttgcatcatgcgacaaaaatcgacgccgtccagctcgcggcaaaggcgcttggcaaagagttaagcctggtgatggtttaattacagttaacgaaaagttgtcatttttaacaactgatatagactgccgaatcatctgcacataattacgattcgataatgaaaaaataccagcagcttgcagaacaattacgcgagcagattgcgagcggtatctggcaacccggcgatcgtttgcctagcttgcgtgaccaggtggcgcttagtggcatgagctttatgactgtcagccatgcctatcagttgctcgaaagtcagggatatattatcgcacgaccgcagagcggttattacgttgcgccacaggcaataaaaatgccgaaagcgccagtcattccagtcactcgagatgaagcagtcgatatcaacacttatatttttgatatgttgcaggccagtcgcgatccgagcgtcgttccgtttgccagcgcctttcccgacccgcgacttttccccctccaacaactaaaccgcagcctggcgcaggtaagcaaaaccgccacagcgatgagcgtgattgaaaacttaccgccaggaaacgcagaactgcgtcaggctattgctcgtcgctatgccttacagggcatcaccatttctcctgatgaaattgtcattactgccggggcgttagaggcattaaacctcagtttgcaagcggtaactgaaccgggcgattgggtgatagtagagaatccttgtttctacggtgcgttgcaggcgctggagcggctacggctgaaggcgttaagcgtggcgacggatgttaaagaagggatagatcttcaggcgctggaactggcgttgcaggagtatccggtgaaagcgtgctggctgatgactaatagccagaatccactcggatttaccttaacgccgcaaaaaaaaagcacaactggtggcgttgctcaatcagtacaacgtaacgctgattgaagatgacgtttacagcgaactttattttggacgggaaaaaccgctgcctgcgaaagcgtgggatcgccacgatggcgttttgcattgctctagctttagcaaatgtctggtgcctggttttcgtattggttgggtcgccgccggaaaacatgcacgtaaaattcaacgcttgcagttgatgagtacgctttccaccagcagtccgatgcaacttgcgctggtggattacctttccacgcgccgatacgacgcccatcttcgtcgcctgcgtcgccagcttgcggaacgtaaacaacgtgcctggcaggcactgctgcgttatctgcctgcggaagtgaaaattcatcataatgacagtggttactttctctggttggagctccccgagccgttagatgccggcgaattaagcctggcggcactgacgcatcatatcagtattgcgccgggtaaaatgttttctaccggtgaaaactggagtcgttttttccgttttaataccgcgtggcagtggggagagcgtgaagaacaggcggtaaaacaattaggcaaacttattcaagaacggctgtaatagcgtttaatttaattcctcttagattgggtaatatgaatttcgaatagcagtcatatttcctaactccttgactatactccagaagataaccttacagacggcataatgcgcggtagctcacaacctgaataaattttctcaggggcgaaggtgtgcctgcaagccgccgtctatggttaaacaaggagatatttttacggcacggcggctgaacaattaattacgacaggagtaagaccttatgagcaagacatttgcccgcagcagcctgtgtgcgctcagcatgacaataatgaccgctcacgccgccgaaccgcctaccaatttagataaaccggaagggcgactggatattatcgcctggccgggatacatcgaacgcggacaaactgataaacaatacgactgggtaacgcagttcgaaaaagagacaggctgcgcggtgaatgtgaaaaccgccgcgacttccgatgaaatggtcagtctgatgaccaaagggggttacgatctggttacggcatccggcgatgccagcctgcgtttgattatgggtaaacgcgtgcagccgattaataccgcattgattcccaactggaaaacgctcgatccgcgcgtggttaaaggcgactggtttaatgttggcggcaaagtttacggcacaccttaccaatgggggccgaacctgctgatgtacaacactaaaaccttcccgacgccgccggatagctggcaagtggtttttgttgagcaaaatctgccggacggcaagagcaataaaggccgcgttcaggcttatgatggccctatctatattgcggacgctgcgttgttcgttaaagccactcagccgcagttgggcatcagcgatccgtatcaactcaccgaagaacagtaccaggcggtgctgaaagtgctgcgcgctcaacacagtttgatccatcgctactggcatgacactaccgtgcaaatgagcgatttcaaaaacgagggtgtggttgcttccagtgcctggccctatcaggccaacgccctgaaagccgaaggccagcctgttgctaccgttttcccgaaggagggtgttaccggttgggctgataccaccatgctgcatagcgaagcgaaacatccggtttgcgcctacaaatggatgaactggagtttaacgccaaaagtgcagggcgatgtggcggcctggtttggcagcttaccggtagtgccggaagggtgtaaagccagtccgttattaggcgaaaaaggttgtgaaaccaacggttttaactatttcgacaaaatcgccttctggaaaacgcctatagcagaagggggcaagtttgttccctacagtcgctggacgcaggattacattgccattatgggcggtcgctaacttcgctggggtgctttatgacgtacgcagtggagtttgacaacgtcagccggttgtacggtgacgtgcgcgcagtagatggcgtcagtattgcgataaaagatggtgagttcttctctatgctggggccgtccggctccggcaaaaccacctgcctgcgcctgattgctggcttcgaacagctttccggcggggctatctctatctttggtaaacccgccagcaatctgccaccgtgggagcgggacgtgaatactgtctttcaggactacgcgctatttccgcatatgagcattcttgacaatgtcgcctatgggctgatggtcaaaggcgtgaataaaaagcagcggcacgcaatggcgcaagaggcgctggagaaagtggcgttggggtttgtacatcaacgtaaaccgagtcaactttctggtggtcagcgccagcgggttgctatcgccagagcattggtgaatgaaccgcgcgtattgctgttggatgaaccgctcggcgcactggatctcaaattgcgtgagcagatgcagctggaactgaaaaaactgcaacagtctctcggtatcacttttatcttcgttacccacgatcagggcgaagcgttaagcatgtccgatcgtgtggcggttttcaataatggacgcattgagcaggtcgattccccgcgcgatctctatatgcgcccgcgcacgccgtttgttgccgggttcgttggtacaagcaatgtttttgatggactgatggcagagaaactttgtggcatgacgggaagcttcgccctgcgaccggaacatatccgcctcaacacccctggtgaactgcaggccaatggcacgatccaggcggtgcaatatcagggcgcggcaactcgttttgaactgaaattgaacggcggtgaaaaactgcttgtgagtcaggccaatatgacaggcgaagaactgcctgccacgctcacgcccggacaacaggtgatggtttcctggagccgtgatgtgatggtgccgctggttgaggagaggtgaatggcgatgaatgtattgcaaagtcctagtcgtccaggtctgggtaaggtgtccggtttcttctggcataatccggggctggggctgtttttactgctgcttggcccgctaatgtggtttggcattgtctatttcggcagcctgctgacactgttatggcagggattttatacttttgacgatttcaccatgagcgtaacgccggaactgacgctggcgaatatccgtgcgctgtttaatccggcgaattacgacatcattctccgcacgctgactatggctgtggcagtcactatcgccagcgccattctggcttttccaatggcgtggtatatggcgcgctataccagcgggaaaatgaaagcgtttttttatattgcggtaatgttgccgatgtgggcgagctacattgttaaagcctatgcctggacgttattgctggcaaaagatggcgtggctcagtggtttttacaacatcttgggctggaaccactgctgactgcgttccttacattacctgcggtgggcggaaatacgctgagtacttccgggctggggcgctttctggtgtttctctatatctggttgccgttcatgatcctgcccgttcaggcggcgcttgagcgtttgccgccgagtttgttgcaggcgagcgctgatctcggcgcacgtccacgacaaacctttcgctatgtggtgctgccgctggcaatcccgggtattgccgctggctctatctttaccttcagtctcacactgggcgattttatcgtcccgcagctggttggtcctccaggatattttatcggcaatatggtttattcccagcagggggcgattggcaatatgccgatggcggcggcattcaccctggtgccgattattctcatcgcactgtacctggcgttcgtgaaacgtctgggagcgttcgatgcactctgaacgcgcaccgtttttcctcaaactggcggcctggggcggcgttgttttcctacattttcccatcctgataatcgccgcctatgcgtttaacactgaagatgcggcgtttagttttccaccgcagggcctgacgctgcgctggtttagcgtggcagcacagcgtagtgatattcttgatgccgtgacactgagtcttaaagtggcggcgctggcgacattaattgcgctggtgttagggacgctggcagctgccgcgctgtggcgacgagactttttcggcaaaaacgccattagcctgttactgctgctgcccattgcgctgccgggcattgtcactggtctggcgttattaaccgcctttaaaaccatcaatctggagccgggatttttcaccatcgtggtcggtcatgcgactttttgtgtagttgtggtgtttaacaatgtcatcgcccgttttcgccgcacctcctggagtctggttgaggcgagtatggatcttggggccaatggctggcaaaccttccgctacgtagtgttgccgaatctcagtagcgcgttactggcaggaggaatgctggcgtttgccttgagcttcgatgaaatcatcgttacgacctttacggcaggtcatgaacgaacgttaccgttgtggttgctcaatcagcttgggcgaccgcgtgatgtaccggtaactaacgtggtggcactgctggttatgttggtaacaaccttgccgatcctgggggcctggtggctaacccgcgaaggcgacaatggtcaataaccactgatacaggaatatgctatgcaacataagttactgattaacggagaactggttagcggcgaaggggaaaaacagcctgtctataatccggcaacgggggacgttttactggaaattgccgaggcatccgcagagcaggtcgatgctgctgtgcgcgcggcagatgcagcatttgccgaatgggggcaaaccacgccgaaagtgcgtgcggaatgtctgctgaaactggctgatgttatcgaagaaaatggtcaggtttttgccgaactggagtcccgtaattgtggcaaaccgctgcatagtgcgttcaatgatgaaatcccggcgattgtcgatgtttttcgctttttcgcgggtgcggcgcgctgtctgaatggtctggcggcaggtgaatatcttgaaggtcatactagcatgatccgtcgcgatccgttgggggtcgtggcttctatcgcaccgtggaattatccgctgatgatggccgcgtggaaacttgctccggcgctggcggcagggaactgcgtagtgcttaaaccaagtgaaattaccccgctgaccgcgttgaagttggcagagctggcgaaagatatcttcccggcaggcgtgattaacatactgtttggcagaggcaaaacggtgggtgatccgctgaccggtcatcccaaagtgcggatggtgagcctgacgggctctatcgccaccggcgagcacatcatcagccataccgcgagctccattaagcgtactcatatggaacttggtggcaaagcgccagtgattgtttttgatgatgcggatattgaagcagtggtcgaaggtgtacgtacatttggctattacaatgctggacaggattgtactgcggcttgtcggatctacgcgcaaaaaggcatttacgatacgctggtggaaaaactgggtgctgcggtggcaacgttaaaatctggtgcgccagatgacgagtctacggagcttggacctttaagcagcctggcgcatctcgaacgcgtcggcaaggcagtagaagaggcgaaagcgacagggcacatcaaagtgatcactggcggtgaaaagcgcaagggtaatggctattactatgcgccgacgctgctggctggcgcattacaggacgatgccatcgtgcaaaaagaggtatttggtccagtagtgagtgttacgcccttcgacaacgaagaacaggtggtgaactgggcgaatgacagccagtacggacttgcatctagcgtatggacgaaagatgtgggcagggcgcatcgcgtcagcgcacggctgcaatatggttgtacctgggtcaatacccatttcatgctggtaagtgaaatgccgcacggtgggcagaaactttctggttacggcaaggatatgagtctttatgggctggaggattacaccgtcgtccgccacgtcatggttaaacattaaggataatattgcagatcgtaagagtatgagatgatcttgcgtactgtcagagcactgatttctctgacagtacgtgctgcgtgcaaaatcactacatcaaataaaccagccaaatctcatagagataagagtaaacaaaccaacagcagcaaagaaatttatcagtactacagttctactggaaacattcatttttgccaccttttatcattgcccctatgtgtatagtacgggttaagaaaatccgcaataatactcattctgaagatggataagggcaagttgctgtttgatgattttttctcaaactggtgaaaaaacttgatgcacgtcaaaaaatgacgcatatttgcgcgcgttttattcatctggctggacgcccgtacatgtctctctatcaacacatgcttgttttttatgcggttatggcagcaatcgcatttcttatcacctggtttctttctcacgataagaaacgcatccgtttcttaagcgcctttctggtgggggcaacatggccgatgagtttcccggtggcgctgttgtttagtctgttttaaatcttactcactggcttgacggcaccacgcagacttatatcatttggatgaatcgataaatttcacaagtggctaaggagaaagtatgagccatctggatgaagtcatcgcgcgcgtggatgccgcgattgaagagagcgtcattgcccatatgaacgaattattaatcgccctgagcgatgacgcggagttaagtcgggaagatcgctacacccagcagcaacgtctgcgcacagcgatcgcccatcacggtcgcaagcataaagaagatatggaagcgcgccacgaacagttaaccaaaggcggcaccatcctctgattaaaaactgcgtctggctaccaaccaggcgccaaccacaagtaaaattgcgccacaaattgggccgaacaacgcccgtagtggtacgccatgactgcggaagatatccagcatcagaccgccaatcagctgactggcgaccagtacagcaatagttgtcgccgctcccacattctgatatccgctgatactggcgaagacaaaaaagcttcccagcaagccaggtataagtgtccaccagcgcacgctggacaccagttcgccaaaccccgccatgccttgtttaaaccataaaatagaaacaaagagcacaatccccaccagactgttcagcaacatggcgatgagaatggtagaggaggtctgggtgatgcgcaccatcagcgtgttctggacaaccagaccaattccggcggcaatcaaaaaagcaagggtgaggctctgattcatccaatcgcgtccggttcagtgcgctcgtcgagttgcaactgcataaatgtcagatccagccaacgaccaaatttagtgcctacctgcggcatttgcgcggtgacgacaaatcccaggctctggtggagatgcaggctggcctgattttggctttcgatcccggcgaccatgacatgcttcccgcaatcccgcgcttcatcaatcaatcggcttaacaatttacgccccagacctttgccctgatgatcgggatggacataaacgctatgttccacggtatggcgaaaaccatcgaaactacgccagtcgccaaagctggcatatcccgtcactacgccgttttcctcgctcaccagcactggataacctgctaaagtccgcgcttcaaaccaggcaatgcggttatcagcatccaccgtttggtcattccagatagccgccgtatacaacacggcgtggttataaatttccgcaatggcagcacagtcggctttgcgggcaaaacggatggacatgtctggcctcaataaaataatgatgatgatgttatcaatactatcgaaaacagcccgaagcaacggattcctcgatgaaattattgcgtgttgcagaggggatgtgacggctgcaaacaaaaccaatcccgtgagcctgctactattgatggattcatgccaaaagcacaggagagcattatggggcaacaaaagcagcgtaatcgacgttgggttctggccagccgtccacatggcgcacctgttccggagaatttccgtcttgaagaagatgatgtcgccacaccgggtgaaggacaggtgttactgcgcacagtttatttgtccctggacccgtatatgcgtggacgtatgagcgatgagccatcttatagtccgcctgttgatattggcggcgtgatggtcggcggtacggtgagccgtgtcgtggagagcaatcatcctgattatcagtctggcgactgggtgctgggctacagtggatggcaagactatgacatatccagtggtgatgatctggtgaaacttggcgatcatccgcaaaatccaagctggagcctgggtgtgctagggatgccaggctttaccgcttatatgggcctactggatatcggtcagcctaaagagggcgaaacgttggtggtagctgcggcgacaggaccagtgggggcgacggtggggcaaatcggcaaacttaaaggttgcagagtggtgggggtagccggtggcgcggaaaaatgccgccatgctaccgaggtgttaggcttcgatgtttgtcttgatcaccacgcggatgattttgccgaacaactggcgaaagcgtgcccaaaaggtattgatatctattatgaaaacgtgggcggtaaggtattcgatgcggtgctaccgttacttaatacatctgcgcgcattcccgtctgcggattagtgagcagctataacgctacagagctaccacccggtccggatcgtttacctctgttgatggctacagtgctgaaaaaacgtattcgcttgcaaggttttattatcgctcaggattatggtcaccgcatccatgagtttcagagggagatggggcaatgggtgaaagaggataaaatccactaccgcgaagaaattactgacggtttagagaatgcgccacagacgtttatcggcctgctgaagggtaaaaacttcggcaaagtggtgatccgcgtggcgggtgatgattaaagtttcaacggcggcgtaagccgccataaaaatccaggcaaaaagcttattttcagctttaattaactaaccacatcattgttctgctgctaataacaacaaaggtgagtggtttatgattattcactttaatacaccaggtgaattccttctgccatgcaggcagggttggacagaaaacacgcgaaggaattaaaatgcctggaacgggaaaaatgaaacatgtcagtttgactctgcaggttgagaacgacctgaaacatcagcttagtattggcgcattaaaacctggcgcacgcctgattactaaaaatctggcggagcaattaggtatgagtattacacctgtgcgtgaagcattattacgtctggttagcgtgaatgcgctttctgtcgcacctgcacaagcatttacagttccggaagtggggaaacgtcaattagacgaaatcaatcggatccgctacgaactggaattaatggcagttgctctggctgttgaaaacctcaccccgcaagaccttgcggaactccaggaattgctcgagaaattacagcaggcgcaagaaaagggcgacatggaacaaatcattaatgtaaacaggctatttcgcttagcgatttatcatcgcagtaatatgcccatcctgtgtgagatgattgagcaactgtgggtcaggatggggcctggtttacattatctctatgaagcgattaatccagcggaattacgggagcatatagaaaactatcatctgttactcgctgcgttaaaagcaaaagacaaagagggatgcagacattgtcttgctgaaattatgcaacaaaatattgctattttataccagcaatacaatcgttaaagtaaatgcccggcaaataccgggcatcaaggtaattactcaaatctccacgcaatattcatgccgacaccataatttcgtccggggctaggttcgtaatatcgcccgttactctcattgacaatgacagaaccaacgtattctttatcgaataaattatcgacacgaccaaataaatccacagttaaattgtggtaattgtatttatacccggtgaataagccgacgagagtataagacggcgcttttgccgtattttcatcatctgccataatatcgcccatataacgcgcttccgtgcctgcataccaaccatcttccggtacataacctatgctcgcaaagcccatattacgggcgatccctggcatccgattaccgttacaatcctgttcattgcaaacattgctgcgataggtcgcatcaagccaggtccaggacgcgtttacgcgaaaatctcctgcgaaacgttgatcccatgccagttcagcgccttgacgacgggtctttccggcatttttgtaagtcgtacgcccaccgctactgctatcgacaacaatttcatcatcagtgtcggtctgaaacaatgcgagactaagcagcccatcaccaatacgcgttttactgccgatctcaattgtatcgttggtggatggttttaaacctaagttcataccgctttgcccatcagcacgataagacagctcattaatcgtcggcgtttcaaaacctcgcccggctgccagatagatattccaggcatcggtcattgcatattttaagctaccggcaggtagccatttatgataactggcatcaccgctgtcatcgccgttacccggagtaacgtaatggtcgttggaatcaaaccacacggagctgtagcgcacgccagcatccaggctcagtttttcgctcagctgccactgcgtctgtaaatagggatcgatgttccacatcagattgcgttcgtcgcgacgcaactcacctttttgcccgtactccggcatgccgctattcaggcggaagttattgtagcccttgcggttttcactcatgttttcgtagttcaggccggtagtgaacgtgaccggaacgcccagttcaccacggtgtgtccagcggctgtctattccctggtaatggcgttgcagggtaatcacgccgcccgcatgactcgggttaagttgtggtgccatgggtatactctggtactgggtcgtttctcgctctccggcatacatcatcacactcatatcatcccggctactcaggctacgctcatagcgcaacccagcctgagtttgcttgatggtttttcgcgtgtcgtactgttctgcacgaggcgcttgttgtggattagccttccattctgctttggttagcccacctgggtcatctgctttgatatccacactattgaaaatcagacttaatttgctggcttcatcaatgcgtacgcccagtttggcattggctaaatttttctgtgcgccactatggtcacgatagccgtgggtcgtaaaacgcgtggtactgacggtgtaatcgacatcgccaggctgtgtgccgtctcccgttgcgcccgttgctttcagcccatagcgccagctgccaaaactgccgtagtaactactggcttcaatggttggtggctgttgtccggtctgggtggtgacattcattaccccaccagacgcgttgccatacagggcagagaaggggccacgcagcacttccacattttgcacactgcttaaatcgatgttggatgtttgcccttgcccgtcgggcatggtggcgggaataccgtccacatacaggcgaataccgcgaataccgtaagtggagcgggagccaaatccgcgaatgctcagctgtaaatcttgcgcatagttctgccggttttgtacctgcaaaccaggcacgccggtcagactttcggacaagttaatgcgcggtgttgccaggcgcatctcctcgccatccaccacgcttactgctgctggggtatccagttcactaaccacctgcggtgcggcactgacaatcatagtctgttcatcagcggcaaaaacaacgggggaaaggacaagcagtgcgggcaaaacggtctgtcggacggaaaaaatcttcatgaaaaaagccaggttaagaatgggaaaacgccgtcatggtaatgaaattgtaaatttatggaaaatgaaacggcacaatacgttaagtaattgagaaaattgtagtcgtaacggcaagaaatgctccacatttgagaaaataatgattaccattcccatttataacaagagcgtaacgatgattacgcttagcgaagcattgtgaagcagcaaaaatatcggttcatcaaagggagtcgtcatgcatttacgtcatctgtttagtagccgcctgcgtggtagtttactgttaggtagtttgcttgttgttagtagtttcagtacgcaggccgcagaagaaatgctgcgtaaagcggtaggtaaaggtgcctacgaaatggcttatagccagcaagaaaacgcgctgtggctcgccactagccaaagccgcaaactggataaaggtggcgtggtttatcgtcttgatccggtcactctggaagtgacgcaggcgatccataacgatctcaagccgtttggtgccaccatcaataacacgactcagacgttgtggtttggtaacaccgtaaacagcgcggtcacggcgatagatgccaaaacgggcgaagtgaaaggccgtctggtgctggatgatcgtaagcgcacggaagaggtgcgcccgctgcaaccgcgtgagctggtagctgacgatgccacgaacaccgtttacatcagtggtattggtaaagagagcgtgatttgggtcgttgatggcgggaatatcaaactgaaaaccgccatccagaacaccggtaaaatgagtaccggtctggcgctggatagcgaaggcaaacgtctttacaccactaacgctgacggcgaattgattaccatcgacaccgccgacaataaaatcctcagccgtaaaaagctgctggatgacggcaaagagcacttctttatcaacattagccttgataccgccaggcagcgtgcatttatcaccgattctaaagccgcagaagtgttagtggtcgatacccgtaatggcaatattctggcgaaggttgcggcaccggaaagtctggctgtgctgtttaaccccgcgcgtaatgaagcctacgtaacgcatcgtcaggcaggtaaagtcagtgtgattgacgcgaaaagctataaagtggtgaaaacgttcgatacgccgactcatccaaacagcctggcgctgtctgccgatggcaaaacgctgtatgtcagtgtgaaacaaaaatccactaaacagcaggaagctacccagccagacgatgtgattcgtattgcgctgtaatagatatggcgagggtgaaaacggtgagacttgcctgccttttatcacggcgtatccggcactttcgtcagtaatctgaatttgcccggcacgtagccgggcaattttgcaattaactcgccgtttcaggcttaaacacaatttcctgtttttcttcatcttcctcgacgactggcgcagtgctgtgaatttcagcaacgcgtttgcgcacaccaaaccagcctataaccagcaaaataccgataatcggcagcgccgcgatagtataagtcccgttcgggtaatcgaacgccatcagcacaaggacactcagtaaaaacagtaatgtcagccaggaagtgaagggcgcgccaggcagtttaaaactgacatccgctgctttgccttctttaatcgctttacgcaggcgcatctggcacacgatgataaacgcccaactagcgatgattcccaggctcgcgaagttcaacacaatctcaaatacgcggctcggcaccagatagttgaggaatacgccgacgacatacacaactagtgtcgccagaatcccggcatacggcacatgctgacgactcattttcgccataaaactcggtgcggaaccgcccatcgccatactgcgcagaatacgtccggtgcagtacagaccactattcaggctggagagggcagcggtcagcaccacaatgttcataatgctgccgatatatggcacacccagtttagagaaaaacgtcacgaacggactttgccccgcctgatacgcgctccacggcaataacataaccagcaacaccacggagccgacgtaaaacaggccaatacgccaaatcacactgttaatggctttaggcaccatggtctgcggatctttacattctccggcagctgtacccaccatttcaatggaggcaaaagcaaacactacgccctgaatcaacaccagcgcaggcagcaaaccgtgggggaagaagccgccattatcggtgattaaatgaaagccagtggtgttgccatccagcggctgaccactaccgaggaacactgtacccacgaccaaaaaggtcacaatggcgagcactttaataagcgcaaaccagaactccatctccgcaaaccatttcacaccgatcatattcatggtgccaacgatggtaagtgcagcgagcgcaaagacccactgcggcacgccgccaaacgcaccccagtaatgcatatacagagcgacggcggtaatatcaacaatccccgtcatcgcccagttgatgaagtacatccagccagcaacataagcggctttctcacccaaaaactcacgggcataagaaacaaaactgccactggaagggcggtgtagcaccagctcacccaatgcacgcagaataaaaaagctaaacaagccacaaattaaataaaccagtgccagtgcgggccccgccatttgcagtcgggctcctgcacctaaaaacaagccggtgccaatcgcgccgccaatggcgatcatctgcacctggcgattgcccatcgctttgtgatacccctcttcgtgggcattaagccagcggcgtttcgcggcgtgttgatcactagtgtcggtgtcgtgtttactcattgctctccctgattgctttaatgaaaaagtcatataagttgccatgaacaatgtttattcatcctggcgatgatagttatcaccattattctttatgggtataaaactatcggcgcagcatcctacccgttatcgataaacgatgcaaaacatccccttacaatcctgaaggggattaatacaactgacgaaaaaatgacaaatccttttgctggttaacctgtgtactgtcctacacttaatctttaaaagattgtgaggggcatatgattaaggtgtatggcgtacccggatggggctctacaatcagtgagctgatgctaacactggctgatattccttatcagttcgttgatgtcagtggttttgaccacgagggagctagtcgcgagttattgaaaaccctgaacccgttgtgtcaggttccgacactggcattggaaaatgacgagattatgacggagacagcggcgattgcattgatggttctcgatcgtcgcccggaccttgcgccaccggttgggcgcgccgaacgtcagctgtttcaacggctattggtctggctggttgctaatgtctatccaacattcactttcgccgattaccctgagcgttgggctcctgacgcacctgaacagttaaagaagaatgttattgaatatcgaaaaagcctttatatctggttgaatagccagctcactgctgaaccttatgcgtttggtgagcaactaacgctggtggactgttatctttgcactatgcgcacatgggggcctgggcatgaatggtttcaggataatgccacgaatatcagtgcgattgctgatgctgtatgtcagttaccgaaattacaagaagtattaaaaaggaatgaaattatttgagtgggataccagaagattatgttatttattattcagtaactttatccacaatgatgggcgtaattaattaaattcatggtatgttttttaatttatatcactctccttttcattcagcgtgtctatttcatttcctctgaaaagaaactaactattcacatcgtgcagatgtttcagttgttaagtcaggcattctataatctcaaaatgtttttaatgatggatatgctcggagttggagatgcaattaatattaatacaaataaaaatatccggcaggtatgctaaaaggataaatggcgttctctgtatttattcgcaattatctgtaggacaaatatggagagcttgatgagtcagagctaaaacagcaattgattaataaacatgttgatttattcaagaaaatggatgtattttaaatgttgattcttaatataacctaatcaatagattatcaagtgagagctacacattattggaggggcaggggaaaacaccattttgggaacaatgcatcaggtactcttaccactgaagcaagatcatccggcaccaggtggtggtgcagtgctttggaaatggtcccctcgggggagttgtcattattttctatgctatttgcttattatattcatcaggtgaatttaataaattcctaatttgaaatatccactattaagctagtgtttaacgacgttaagatggcaatgtgcagatcatgttatcagggtggggcggtagcgtatattccttatacaaaccatcattcatttcaatgattgttattgaattatttattgttgtgaataaaaagacattatgaatattggtttgactttgcatatcaggttttttattactcgctgtaatgtacgagcctgtcgtgaataacgtcgagaacccatccgttgcgtttgtgattattttgttgactaaacagacacccgtttctctgaagtaaaatcccagactaaatcatcacataaccatgacatttttctgatattccccggtaacgccagataacgatgccaaatttaccgttatgttcaatcaactccctggtccatgtcgatttatctaccacaatcgccacgcgtggaggttcaaactccaccggcattgaccaggctgcagccataatgttacgccgctgggattgctcatcgaaactggtgatcaagaccgttgggccatgatttaacagacggctggcatggtgtaattctatggggatgaatcggctcatggtatcgcctcgcgaagaaggtttttttaagcgtagtccgtaacgcaataagtaacgaaattaacgggattggcgatttgcgaacgtgatgcatgtccgcgatcgcacaaaatagccggtgcggcgtctattccaggttataagttgagaaaaccactaagggaaacgcctgatgacgcccattctgaatcactattttgcccgtattaactggagcggagctgctgcggtcaatattgatacgcttcgtgcattgcacctgaaacacaattgcaccattccgtttgaaaacctcgacgttttgctgccgagggaaatacagcttgataatcaaagcccggaagagaaactggtgatagcccgtcgtggcggttactgttttgagcagaatggcgtgtttgagcgggtgttacgcgagctggggtttaacgttcgcagcttgttagggcgcgtagtgttaagtaatccgccagcattaccgccgcgcacccatcgtttgctgttggtggaactggaagaggaaaaatggattgctgatgtcggtttcggtgggcagacgctaaccgcgccgattcgtttagtttccgatctcgtgcagaccacgccacacggagagtatcggttgttgcaggagggtgatgattgggtgttgcagtttaatcatcatcagcattggcagagcatgtaccgttttgatctctgcgagcagcaacaaagcgattatgtgatgggcaatttctggagcgcgcactggccgcagagccattttcgccatcatttgctgatgtgccgccatttgccggacggcggcaagctgacactgaccaattttcattttacccattatgaaaatgggcacgcggtggagcagcgaaatctaccggatgtggcgagtttatatgctgtgatgcaagaacagtttggtctgggcgtggatgatgcgaaacatggctttaccgtggatgagttagcgctggtgatggcggcgtttgatacgcacccggaggcgggaaaataatttatgtcaggttgccggatgcggcgtaaacgccttatccggcatacattagcccggttgtagacctgacaggcgaagcgcatcagacaacggtttcagagttcaattgcccattcggcatgaaacaaaatcaccgctgtgccactaatggtgactttttccggttggttatcacgaattgtcaccgtcacttcaatcataccgtcacgccccaatgcgcgcccctgatggcctttaacacgcaacacgttgccatcgtggggcaatacgttgtgatgtaccaaccatgcacccatcgggccattggcattgccagtcaccggatcttccacaataccaatcgcagggctgaacatgcgaccatcggtttcgtttttgcctgggcggatctggaacgggaagaaaccattgcagccaatctttttgctgatagcggtcagcgcattaaggtcagggctaagggcgtcgatatccacttccggtttcagtgggatcatcactttactgtgtcctgttgttgccacctgaattggcaagcctggcagaatatcgtcctcagtgagatgaagcgcgttgataatcgccgcacgtgtttcaccttccagcggtggctcaaagcccggcgtaccttgttccaggctaatacgataatcatcgttgtgcttttcgatagtcacgcgatgttttcctgccaggcttgtttgccagatcgtgcaatttcctaaacctaacaccttcgcacgtacatagtgcgcagctactgtcgcgtgaccgcaaatcggcacttcaaccgttggcgtaaagtagcggatgcgcacatcgctgtcgtcgctgtgcagcagaaaagcagtttcgctatggcctaactcgcgggcgataagctgcatttgcgcttcgctaagattatcggcggggaaaacaacaccggcagaattgccgcgaaacggttgactggtaaaagcatcgacgtggtacacctgcggtttcattaacgttctcctgtgactggagaactatcatagcctgcaagtggccggagagcgaagggctatccggccagggtgaaattatcgccggctacgcacaatttgatatcgacgagtaaagtactcaaacggcgcgctccacacatgcaccagtcgggtgaacgggaagagcaggaagatggtcattcccaacaccagatgcaggcggaagacgaacgctacgccgttgagcatctcactgcttccaccacggaaagtgacaatgctttgcgcccaacccaccagcttcatcatttcgctaccatcaggatactgtgcactaaacggtatggtacttagccccaacagacactggatcagcaaaatgctcatgatgatgatatccggcgtagtggaagtggcacgcacgcgctgatttgtcagcctgcgccacagcagtcctgcgccgccaatcaacgtcaacacaccgcaaataccgccgagcaccatcgccatgagttgtttcgctgccactggcaaaaaccacgcgtacatccagtgcggcgttaacatgccgaacaagtgcccgaagaaaatccccaaaatgccgatatggaacagattgctccatatcaccatcccgcgtttatcgagcatttgactactggaggcgcgccaggtgtactgcccgtagtcgtagcgcagccagctgccgaggaaaaacaccgtcgcacaaatgtacgggtagatatcgtaaaaaaagacgttcagatactgaatcatttcccacctcccgcactgatgtcgacatattgcggcgcgacatcctggctaaagcgtcgctgatattgattaagcgggctgctgtcacacgccgtggcgttatcttcaataaacttcacctgttcctcttcccacactgcatcaagcgcctggcgggtgtcatcgcgctcttcgctgtttacttgttttgtgacactgtcactactaagggagcttcccgccagttgcagcagagcatcaaacaacgcgtaccacggtgcctcgcgttgttttaagcgaccgccaagcagggcgaggatcggcgcaacattgagcaatccttctttcgcctgatcgtcaggcagtacgcttaaatactccagatacagcggtagataatcgggcagttcccgacaatccagctgcaggccgaccttttcatactccgccagcaggtccaccattgcctggccgcgatcgcgggactcggcatgaacatgttcgaacagcagcaggctcgtggtgcgcccgcggtcaaacacttcgcaccattcggcctgtttatccagcagcggcgcgttaagcaggttgtgggtgaaatccgtaagcatcggcgcgtcgcggcggatcaacgccagcgcgtcctccttgcattcccacaacagctcgtccggatactccatcaacaggccgatcactttgaggatctgcattattcgccctccgctttgtcgcgcacttcggtgatgttgatggcatcgatacggctactgttgaacaggttgaatttactgtcgctaccgtggcaaccgtcgccaaaggtaaaaccgcagccgttgcgttctgcgaaggcatcgcccgccatttcccgatggctggtcgggataacaaaacgatcttcatagttggcaatggcgagatagcgatacatctcttcgacctgggcgacgctcaggcctacttcgtcgatggcacgagtatcagtaacgccttccacggtttgactacgcatatagtggcgcatcgccatcatccgtttcagcgcccgcagtaccggaccggtatcgccggcactcaacatattggcgagatattgcaccggaatacgcaggctttcgatggcgggcagcacgccttcgcttttcggcaaaccgcccgcatctgcgtaggactgaatcggactcagcggaggaacgtaccagaccatcggcagggtgcggtattcagggtgcaacggtagtgccagtttccagtccatcgccattttgtagactgggctacgctgggcagcgtcaatcacattttgtggaataccttgtttcagggcttcctcgatcacactgggatcgtgtggatcgaggaacacttcgcactggcgttcatagaggtcaacttcgcgctcggtgctcgccgcttcctcgatgcggtcggcgtcgtaaagcagcacgcccagataccggatgcgacccacgcaggtttcactgcacacggtcggttgaccggactcaattcgtgggtaacagaagatgcatttttcactcttgccgcttttccagttgaagtagatttttttgtacggacaaccgcttatgcacaaacgccagccacggcatttatcctgatcaatcagcacaatgccgtcttcttcgcgtttgtagatagcgccgcttgggcaggtcgccacgcagctgggattgaggcagtgttcgcacaggcgcggcaggtacatcatgaaggtgttttcaaactgcccgtacatctccttttgcatggcctcgaagttgcggtcgcgggcacgtttttcgaactcaccgcccagcagttcttcccagtttggcccccagatcactttgtccatccgtttgccgtcaatcagactacgcgggcgagcagtaggaatatgtttgccttccggtgcgctatgcaaatgttcgtagtcgaaggtgaaaggttcgtagtaatcatcaatctgcggcaccaccgggttggcgaagattttggttattacgcccatcttgttgcccagacgcgggcgtatcttgccattcacatcacgcacccagccgccttgccactcttcctgatcttcccagtttttcggataaccaatgcccggtttggtttcgacgttgttaaaccatgcgtactccatgccttcgcgcccggtccagacgtttttacaggtcacgctacaggtatggcagccgatacatttgtcgaggttaagcaccatgccgacttgactacggattttcattttttcgcctcctgtacctgatcgcgaccttcatcatccagccagttaacgttcttcatcttgcggatcatgatgaactcatcgcggttgcttccgacggtgccgtagtagttaaagccccaggccagctgcgcgtaaccgccaatcatatgcgttggtttcgggcaaacgcgggtaacgctgttatgaatgccgccgcgcatgccagttacttcgctaccaggaatattcataatgcgttcctgggcgtgatacatcatggtcatgcccggcggtacacgttggctgaccaccgcgcgggcagtcagcgcgccgttggcgttgaatacttccacccagtcgttatcgacaatggtcagttctcgggcatctgtttcgctgatccagacaatcggtccaccgcgagagagcgtcagcattagcaggttttcactgtaggtactgtgaatgccccatttctggtgcggcgtcaggaagttaagtgctttttccgggaagccgtttggcggtatctggcgcatctcactgacgctacgggtgtcgataggcgggcgataagccaccaggctttcaccaaaagcacgcatccacggatgatcctgatagagctgctggcgtccgctcagcgtgcgccacggaattaactcatgaacgttggtgtatcccgcgttataggagacgtgatcgctttccagaccggaccaggtggggctggagataattttacgcggctgcgcctgagtatcgcgaaagcgaatcttctcgtcctctttgtgcagcgccagatgggtatgttcgcgcccggtgatctcgcccagcgcctgccacgctttgactgcaacatgaccgttggtttccggtgccagtgccagaatcacttcactagcgtcaatggcggtgtcaatcagcggacgcccctgtgccgggccatcacgcttggtgtaattgagtttgccgaggaaatcgatttcatcctgggtattccagctaatccctttaccgccattgccaagtttgtccatcaatggcccgaggctggtaaagcgttcatacgtagcagggtagtcgcgctccaccgccacaatattcggcgcggttttgcctggaatcagatcgcattcgcctttgcgccagtcgagcacttcacacggctgactgagctctgccggagagtcatgcagtaggggttgtaataccacgtcggtttctttgccaagatgacccacgcacacttggctaaatgctttggcgatacctttgtagatttcccagtcgctgcgactttcccacgccggatcgaccgccgcagaaagcggatgaataaacggatgcatatcgctggtgttcatatcgtctttttcgtaccaggtggcggtgggcagaacgatatcggagaacaggcaggtactggacatgcggaagtcgagcgtcaccagcaggtcgagcttgccttcaatcgctgcagtttgccactcgacttcttccggtttgatcccgtcgctggcaccgagttcctcgccctgaatcccgctttcggtccccagcagatacttctgcatatactcgtggcctttgccggaggagccaagcaggttagagcgccagacaaacaaattacgcggatgattgctgctgctatctggttgttcgcaggccatacgtaaatcgccgcttttcagcgcctgggcggtaaattctgtgggggataatccggccttgtcggcttcagctttaatcccgagcgggttacgccccagctgcggcgcagaaggtagccagcccatacgttcggcgcgaacgttgaaatcaatcagatgaccgctgtacttactggcatcggcgagcggactaagtaactcctgagcagagactttttcatagcgccattggctggaatgattgtagaaaaagctggtgctgttcatttggcgcggtggtcggttccagtcgagcgcaaaggccagtggcaaccagccggtttgtgggcgcagtttttcctggccgacatagtgtgcccagccgccaccgctttgcccgacacaaccgcagaagatcagcatattgatcatcccgcggtagttcatgtccatgtgataccagtggttaacacctgcgccgaggataatcatgctgcgcccatgcgttttatgggcggtatcggcaaattcacgggcgatggtttcaatatactggcgcggcacgccggtaatttgctcaccccaggctggggtgtacggtttgatttcagcgtaatctttcgcactgttttcatcttccagcccgcgatcgaggccgtaattcgccagtaccaaatcataaacgctgaccaccggacaggtgttgccatcgactaacgtcaggtttttaacgggcaattggcgcaccagcaccggattgtgttttacgctgcgaaaatgcggattttcaatgccgccaaagtaggggaaggccacgcctgcaacagcgtcatgttgaccgagcagggttaagctcaattcggtttccgtaccggcggcaatggattccagattccatttgcctttttctccccagcggaaaccaatgctaccgttcggcactaccaattcacctgcggtattaactgctacggttttccactgcggattgttgctttcgcccagtccatccaccaggtcagatgcgcggatcatgcgcccgggaacgtagctaccatcgtcgcgaggctccagcattaccagcatcggcatgtcgctgtagcggcggcagtagttgataaagtagtcgctgggattatcgagatgaaactcttttaaaatcacatggcccattgccatcgccagggcgctatcagtgccttgtttcggtgccagccactggtcgcacaatttggccacttcagagtagtcaggggtaatggcgatggttttagtgcctttgtagcgtacttcggtaaagaagtgggcgtccggcgtacgtgtctgcggtacgttagacccccaggcgatgatgtagctggagttataccagtcggcagattccggtacgtcggtttgctcgccccaggtcatcgggctggcgggcggcaggtcgcaataccagtcgtagaaacttaaacaggtgccgccaagcaggctcagataacgcgttccggcggcgtaagaaaccatgctcatcgccgggatcgggctgaaaccggcaacgcgatccgggccgtaggttttgatggtccagacgttagcggcggcaatcagctggtttagttcctgccagttggagcggataaacccgccgcgcccacgcacttgtttgtagctcaggcacttttgcggatcgttcataatgcttgcccacgccagtaccggatcgctgtgttgcttgagggcttcgcgccacagttcaatcagtcgtttacgaatgagcgggtatttcaggcggttagcgctgtaaagataccaggagtaacttgcgccacgcgggcagccgcgaggttcatgattgggcaggtcagggcgagtgcgcgggtagtcggtctgttggatttcccaggtcaccagaccatttttaacgtagattttccagctacaggagcctgtacagttaacaccgtgggtggaacgcacgattttgtcgaactgccaacgctggcgatagctgtcctcccagtcgcggttgctatgcatcacctgtccgtgaccatcggcaaaggtttcgcccttttgtttgaagtagcgaaagcgatccaaaagtttactcatgacatgactcctgctccaggaatgaattgggatctgatgccttgtcggatgcgacacggttgtacatcaggcatcgatctcttatttttggctgaacttccgccgaccataaaccagccaggtcagcagcacacaaacgatgtagaagattaaaaacactttcatcgcgccgaccggagagccggtcatattgaggctcatgccaaacgcctgcggaataaaaaagccgcccactgcgccaatggcactgataaagcccagagccgccgccgtttcggtgacggcttcttcatgagcttgctcatcactaccgcctttcatctttacccgataaatggttatctggcgaaagatgacggcgatcatctggaaagtagaaccacttcccagacccgcagtcagaaacagccccataaatacggcgtaaaaggcgatgaaattaccggagcctgtgcccggtaaggtaaggaacagcagggcactgaaaatcgccataaaaataaagttgatcaacgtcacccgcacgccgccgaacttatcggaaatagcaccaccaacgctccgcgcgatggcaccgataaatgggccaaagaacgccaggcgcagaatattcacatccgggaactgggtttttgccagcatggcaaaacccgcagaaaaaccgataaagctaccgaaggtggcaaggtaaagcaggctcagcagccagagatgcaggcgttgtaagacagggagctggtcggcaatactggcgcgactactggcgatatcattcatcccactccatgcggcgatcgtggcaatcgccagtagcggtacccaaatccatgcggcattcgccaggctcatcacgctaccgtcggcctgcggtacgccattgacgccgagaaaggcaaatacaggtacaaaaatgaccagcggtgcaaccagctgcattacacttacacctaagtttcctaatccgccattaatcccaagagcgctcccttgtttggcttttggaaagaagaaactgatattgcccatgctgctagcaaagtttgcacctgcaaaaccgcatagcaaagcgataacgataaatatcccaaaaggagtattcggattttgcacggcaattccgagccagacgcaaggaataatcaggattgcagtactaaaaaccgtccatcggcgtccaccgaatataggcaccataaaggagtagggaacacgcaataatgcgccagaaacggagggtaatgcggttaataaaaagagttgatcggtagtaaaattaaaaccgattttattgagattaacggtaactgcgctaaatagcatccagacacagaaggcaagaagtagacaactgacacttatccagagatttcttcgagcaatatgttttcctttattttcccagaaggccggattttctggtttccagtcgcgcaaaagataacgactatttttctcattttgcagtgccatattgttcctcacatgcacacattggtaatgaaaaaaagacaaaacacgaggtaaggcgcaatagccagttattagaattaaggatgaattgggtgaagtgctgattgaaagaatagataagaaagcgtaaccgcgggggcagaatggggattaagtagccagatatgtgttactaaatgtaactaacaagctaaccttcaaacggggttaatctttgaacgtatgtcatgtttcaacccttcagatcgtgaatctaaagggttacatattaactatattatcaacaagaccagacacttatagaattagtgatgatttattcattaaaaaggccaactactggaggaaaagcttctgtccagaaggtctatcggttcctctcttattgcctgattgtaataatcgttattacagtaagtattgtttatttcatctaaggtcatgtttttaacttttatattcatctggtttacaacttcctctgtcttgtaagtgtgtatattatatggggtatatgcttttttaataggatagtgaaacaattcgttatccacatctattccgtcagagtgaacttcaaatgcaccagggctaagaattgccaggccagtattaagcttaagtgctggggaaaacaaattaaataacatgagctgcatagtagggcaattgttcttcccagaaacatttaaaaaatttaagttttgctctgttttattatggggaataaagttccaatatcggatgtattattagtatcaatgtgggttattttattattgtccagtcttaaacttttgatagatggaagataagtcaggaaatcaagatttatatatttcaactggttgttagcagcgtttaatgtctgaacattgcagaagttgctatagaatattttaatttcagaaagcaaattgttgttaataagtaacgtattcaagttgggaaataagtcattgtgtaaacttgttagtttattatgggatagatccagcagtaagagttcatttttattacctgcaacaatatcagttaattgattatggctgagattcaggtattgcagccattcgcaagattctaattgcacaaactctagttgattatgtgccgcactaaaataagtaacactactaagcctatctatatcaatatttctgagagcattattattcatagatatatgtgtaatacttacatttctgccttgaggaaaatttatactctcaagagcattactattcagacttagctttacgagtctatcgtagttggttgcatcaaaatgtgtgaattggttattatcaagattgatagatgtgaagttttgcagccctggtggttgagtggttaaattaagtccacttaaatcaatggtcacttcattagtgtcatcaattatatttcttactgcagtccagtactgcatttgtgcaagtggatcattgttgatgccgttaactaatacatgccaaagatgtttactacttattagttgatcaatgtcattggttggcagtaaattgttattgcttaagtttaaatattccagttttgtagtgtttttggcgtttaaatgtgcaatatggttgtcgtttaaagtgattgttttcatcctgggatgattgtgtaatataaggtcagtgatcatattgtgatgggcacttaactcaatcagagattcttgccgcggctgccgttggcttcatcgttatagcctttaaaatcatattcccagtgaccaaaaccaatcatttgatcattgatttgcgtttctcctttaaagccgagacgggcataagttttatcaccatcgtcacgcttatcatcagtaaaataacgtagagcggtaaccttgccataaaggtcgagtttattaccatccttgttatagacttcggcagcgtgtgctacgttcgcagctaacaaaccagttacaaccaccgcaactatttttaatttcatttaacagaatccttttaattatcgttaaacgtattttctaaacgaattttaaacggcgtcatttataaatgacatactgtttttaaaatagaatggtgattaaaaacaatgagaaaaatagatgaaataatattatttatcgatatgtgatcgaagtcgaaatgagatataaggtgaattactggtatttgaaatttatttttttaatattgtcggaatttatctgattaactaccgggccgtagacccggcagttattttaaccacgacgtgtcgccagccagcagagcagggaaccgccgcagaccatcagcgcgccttgccagaagctgaagctcagcggggcgctgagcagcacggctgcaagcgcactggaaagtacaggcgtaaaatagctacctaccgccataatggtgacattgccatgcaatataccgacattccatgcagcataagcaaatcctaaggtaaatgccgcagagatgagtttaatcatgacgggcgtgctaaatatcatttctggttgtggcgtaagaaaatagtaaacccacagacttgctcccgttagcaggacaaaaacggtaattccattaaatccgcgtgcgtatttattcgttactgtgcaataggctgcccagataaacgcaccaatgaacgccaggaaataactcaatgggctggtggtgatattattgatgatttcatcataatgtaacccattgtcaccgcctaacacccaacagacgccgacgagggctaataataatccaggtacaatcaaccagttggttttctgaccattaaacagaatggcaaagagaattgtcaggctgggccacagatagttcaccatacccacttcaatcgcctgatgatgggtcgccgcataccctaaggaaagcgccagacagatttcatagctgacgaataacagactcccggcgagtaaatagcctttcgggatttgccgaatacgcggaaatccaaccgtgaagattaacagcagcccgcttaaactatagatagcagctgcgccgccgaccgggccgagcccctcactgacaccgcgaatcaatcctaccatcgtgctccacaggacgatcgctatcagccctatgagcgttgctttttgtcgtgtcatgctcgctgttttgtctctcttgccgttaaaaattaagctgaattttatagcatttttttaactggcctgtcaggcagtggtgcgtttttctaccgctattgaggtaggtcaatttgcgaaggcggattattttgtggcaaacagatgttctttttgatttcgcgcaaaaagattcagaattttactgttagtttcctcgcgcagtaatacccctgaaaaaagaggaaagcaatggacgtcagtcgcagacaattttttaaaatctgcgcgggcggtatggctggaacaacagtagcggcattgggctttgccccgaagcaagcactggctcaggcgcgaaactacaaattattacgcgctaaagagatccgtaacacctgcacatactgttccgtaggttgcgggctattgatgtatagcctgggtgatggcgcaaaaaacgccagagaagcgatttatcacattgaaggtgacccggatcatccggtaagccgtggtgcgctgtgcccgaaaggggccggtttgctggattacgtcaacagtgaaaaccgtctgcgctacccggaatatcgtgcgccaggttctgacaaatggcagcgcattagctgggaagaagcattctcccgtattgcgaagctgatgaaagctgaccgtgacgctaactttattgaaaagaacgagcagggcgtaacggtaaaccgttggctttctaccggtatgctgtgtgcctccggtgccagcaacgaaaccgggatgctgacccagaaatttgcccgctccctcgggatgctggcggtagacaaccaggcgcgcgtctgacacggaccaacggtagcaagtcttgctccaacatttggtcgcggtgcgatgaccaaccactgggtggatatcaaaaacgctaacgtcgtgatggtgatgggcggtaacgctgctgaagcgcatcccgtcggtttccgctgggcgatggaagcgaaaaacaacaacgacgcaaccttgatcgttgtcgatccccgttttacgcgtaccgcttctgtggcggatatttacgcgcctattcgttccggtacggacattacgttcctgtctggcgttttgcgctacctgatcgaaaacaacaaaatcaacgccgaatacgttaagcattacaccaacgccagcctgctggtgcgtgatgattttgctttcgaagacggtctgttcagcggctacgacgctgaaaaacgtcaatacgataaaagctcctggaactatcagctcgatgaaaacggctatgcgaaacgcgatgaaacactgactcatccgcgctgtgtgtggaacctgctgaaagagcacgtttcccgctacacgccggacgtcgttgaaaacatctgcggtacgccaaaagccgacttcctgaaagtgtgtgaagtgctggcctccaccagcgcaccggatcgcacaaccaccttcctgtacgcgctgggctggacgcagcacactgtgggtgcgcagaacatccgtactatggcgatgatccagttgctgctcggtaacatgggtatggccggtggcggcgtgaacgcattgcgtggtcactccaacattcagggcttgactgacttaggcctgctctctaccagcctgccaggttatctgacgctgccgagtgaaaaacaggttgatttgcagagctatctggaagcgaacacgccgaaagcgacgctggctgatcaggtgaactactggagcaactatccgaagttcttcgttagcctgatgaaatctttctatggcgatgccgcgcagaaagagaacaactggggctatgactggctgccgaagtgggaccagacctacgacgtcatcaagtatttcaacatgatggatgaaggcaaagtcaccggttatttctgccagggctttaacccggttgcgtccttcccggacaaaaacaaagtggtgagctgcctgagcaagctgaagtacatggtggttatcgatccgctggtgactgaaacctctaccttctggcagaaccacggtgagagcaacgatgtcgatccggcgtctattcagactgaagtattccgtctgcctagcacctgctttgctgaagaagatggttctatcgctaactccggtcgctggttgcagtggcactggaaaggtcaggacgcgccgggcgaagcgcgtaacgacggtgaaattctggcgggtatctaccatcatctgcgcgagctgtaccagtccgaaggtggtaaaggcgtagaaccgctgatgaagatgagctggaactacaagcagccgcacgaaccgcaatctgacgaagtggctaaagagaacaacggctacgcgctggaagatctctatgacgctaatggcgtgcttattgcgaagaaaggtcagttgctgagtagctttgcgcatctgcgtgatgacggtacaaccgcatcttcttgctggatctacaccggtagctggacagagcagggcaaccagatggctaaccgcgataactccgacccgtccggtctggggaatacgctgggatgggcctgggcgtggccgctcaaccgtcgcgtgctgtacaaccgtgctagcgcggatatcaacggtaaaccgtgggatccgaaacggatgctgatccagtggaacggcagcaagtggacgggtaacgatattcctgacttcggcaatgccgcaccgggtacgccaaccgggccgtttatcatgcagccggaagggatgggacgcctgtttgccatcaacaaaatggcggaaggtccgttcccggaacactacgagccgattgaaacgccgctgggcactaacccgctgcatccgaacgtggtgtctaacccggttgttcgtctgtatgaacaagacgcgctgcggatgggtaaaaaagagcagttcccgtatgtgggtacgacctatcgtctgaccgagcacttccacacctggaccaagcacgcattgctcaacgcaattgctcagccggaacagtttgtggaaatcagcgaaacgctggcggcggcgaaaggcattaataatggcgatcgtgtcactgtctccagcaagcgtggctttatccgcgcggtggctgtggtaacgcgtcgtctgaaaccgctgaatgtaaatggtcagcaggttgaaacggtgggtattccaatccactggggctttgagggtgtcgcgcgtaaaggttatatcgctaacactctgacgccgaatgtcggtgatgcaaacagccaaacgccggaatataaagcgttcttagtcaacatcgagaaggcgtaagggggcgaacagatggctatggaaacgcaggacattatcaaaaggtccgcaactaactccatcacgccgccttctcaggtgcgtgattacaaagcagaagtcgcaaaacttatcgacgtttccacctgtatcggctgtaaagcctgtcaggtggcgtgtagcgagtggaacgacatccgtgatgaagtggggcactgcgtcggggtttacgataaccccgccgatctgagcgccaagtcctggacggtgatgcgctttagcgaaaccgaacagaacggcaagctggagtggctgatccgtaaagacggctgtatgcactgtgaagatcccggctgcctgaaggcgtgcccgtctgctggtgcaatcattcagtacgctaacgggattgtcgatttccagagcgaaaactgcatcggctgtggttactgcattgccgggtgtccgtttaatattccgcgcctcaacaaagaggataaccgggtatataaatgcacgctctgcgtcgatcgcgtcagcgtcggccaggaaccggcttgtgtgaaaacctgtccgaccggggctatccacttcggcaccaagaaggagatgctggagctggcggaacagcgcgtggcgaaactgaaagcgcgtggttacgaacatgctggcgtctacaacccggaaggggtcggtggtacgcacgttatgtacgtgctgcatcacgccgatcagccggagctgtatcacggtctgccgaaagatccgaagatcgacaccagcgtaagcctgtggaaaggcgcgttgaaaccgctggcagcggctggctttattgccacttttgccgggttgattttccactacatcggtattggcccgaataaggaagtggacgatgacgaggaggatcatcatgagtaagagcaaaatgattgtgcgcaccaaatttattgatcgcgcctgtcactggaccgtggtgatttgcttcttcctggtggcgctgtccgggattagcttcttcttcccgacgctgcaatggctgacgcaaaccttcggtacgccgcagatgggacgcattttgcacccgttcttcggcattgcgattttcgtcgcactgatgtttatgtttgtgcgttttgtgcatcacaacatcccggataagaaagatattccgtggctgttgaacattgtcgaagtattgaaaggcaatgagcataaagtggcggatgtcggtaagtacaacgccgggcaaaagatgatgttctggagcatcatgagcatgattttcgtgctgctggtgaccggggtgattatctggcgtccgtactttgcgcagtacttcccgatgcaggttgttcgctacagcctgctgatccacgcggctgcgggtatcatcctgatccacgccatcctgatccatatgtatatggcattttgggtgaaaggaagcattaaagggatgatcgaagggaaggtaagtcgtcgctgggcgaagaaacaccatccgcgctggtatcgtgaaatcgagaaggcagaagcgaaaaaagagagtgaagaagggatataatctcttttgaactttaagctgaaaatggcgctgtaaaaggcgccattttcatattgtagacaacgtaggctttgttcatgccggatgcggcgtgaacgccttatccggcatgaaaacccttcaaatccaatagattgcagtgaacgtgtaggcctgataagcgtagcgcatcaggcaatgttgcgtttgtcatcagtttcaaatggcgctgtaaaaggcgtcattttcatattgtagacaacgtaggctttgttcatgccggatgcggcgtgaacgccttatccggcatgaaaacccttcaaatccaatagattgcagtgaacgtgtaggcctgataagcgtagcgcatcaggcaatgttgcgtttgtcatcagttctaaatggcgctttataaagtgccatttttttattgcgtaaccagacggcgtaatcggctcacatccactgttttttctgcctctgccagactccaggcgttttgcagattcagccacatttgcgggctactgccgatcaccacggaaagtttaatcgccatttctggcgtcaaagctgcttttcctgtcagcaatcggcttgccgtactgggagcaatttccattgctctggcaaactcgcgcagactgacattaagttcgtccagactttcctgaataatgtcccccgggcggggatgattggccattttcattagtgtctttactctcagtagcgttccttcactgggaacactatcattattgttccttcctacgcaacaataatccatttagccatttcatgttggagagtgtgcgatgctgcgacccgaacatggcagtcgcagcaaaggcctcttagtgacggaaatcaatcaccatgcggccacggattttgccttcttccatctcagtaaagatggtgttgatgtccgctaacggacgcagggcgactttcggcaccactttaccttcggcggcaaactggaaggcttcagttaaatcctggcgcgtgccgaccaggctaccgaccacttcaataccatccagcacaagacgtgggatatccaggctcatagactccggcggtagaccgacagccacaacacgaccgcctgcacggacagcatcaactgcgctgttaaacgcagctttagctaccgctgttaccaccgcagcgtgagcgccaccagttttctcctgcacaattttggcggcgtcttcggtgtgactgttaatcgctaaatctgcgcccatttcggttgccagttttaactgctcatcattgacatcaatggcgatcactttggcgttaaagacattcttcgcgtattgcagggcgaggttacccagaccgccaagaccgtagatagcaatccactgccctggacgaattttactcagcttaacggctttgtaggtggtgactcccgcacaggtaatgctgctggccgccgcgctgtccagaccatctggcacttttaccgcgtaatcggcgaccacgatgcactcttccgccatcccgccatcaacgctgtatccggcatttttaacactacggcagagcgtttcgttaccactgttacagtattcgcaatgaccgcatccttcgtagaaccacgccacgctggcacgatcgcctggttttaaactggtgacacctggacccacttctgccaccacaccgatgccttcatggcccagaattacgccggttttgtcaccaaaatcgccattcttaacatgaagatcggtatgacatacaccacaacactccattttcagcagggcttcgccatgtttcagactgcgcagtgttttatacgtaacgtcaacatgatgatccttcgtaacaactgcagccttcatagttcctccttttcggatgatgttctgcatagcaggtgaggcaaatgagatttattcgccactacccagtatggatgagatctgaaaaagggagagggaaatagcccggtagccttcactaccgggcgcaggcttagatggaggtacggcggtagtcgcggtattcggcttgccagaaattatcgtcaatggcctgttgcagggcttcggcagaggttttcaccgccacgccttgctgctgcgccattttgccaaccgcaaacgcaattgcgcgggagactttctgaatatctttcagttccggcagtaccataccttcgccgttcagcaccaatggactatactgcgccagcgtttcacttgcgctcatcagcatctcatcggtgatacgactcgcgccggaagcaataacacccaggccgatgcccgggaaaataaaggcgttgttacactgggcgatagggtagattttatctttccataccactggattaaacgggctgcccgtggcgaccagcgcgttaccttcggtccaggcgataatgtcctgcggtgtggcttccacgcgactcgtcgggttagacagcggcatcacgatcggacgcggacagtgtttatgcatctcacggatgatctcttccgtaaacagcccggtctgtccactgacgccaatcagaatatctggttttacattgcgcaccacatccagcagactcagcacatcgctgtcggtatcccagtcactgaggttttcgcgcttctgcaccagtttggtctggaaaggcagcaggttcggcatcttgtcagtcagcaagccaaagcgatcgaccataaagactttctgccgcgccgcttcctcgcttaatccttcgcgctgggtctgggagatgatcatttcggcaatgccgcatcccgcactacctgcgccaaggaagacgatttttttctcgcttaactgaccacctgccgcgcggcttgctgcgatcagtgtgccgactgttaccgccgcagtgccctgaatgtcatcgttaaaagaacaaatttcattgcgatagcggttaagtaacggcatcgcatttttttgagcaaagtcttcaaactgcaacagcacgtctggccagcgttgtttcacagcctggataaattcatcaacgaattcatagtattcgtcgtcagtgatacgcggattacgccagcccatatacagcggatcgttaagcagctgttggttgttcgttccgacatccagcaccaccggaagggtatacgccgggctgatgccgccacaggcggtatagaggctcagtttaccgatcggaatgcccatcccgccgatgccctggtcaccaagccccagaatgcgttcaccgtcagtcaccacaatcactttaatattatggttcggcacgttttgcagaatatcgtccatattgtgccggttctggtaagagataaacacgccgcgactacggcggtagatctcagaaaaacgctcacaggctgcgccgacggttggggtataaataacaggcatcatctcatcaagatgattgtttaccagacggtagaagagggtttcgttagtgtcctggatgttacgcaggtagatgtgtttgtcgatttcggttttgaatccctgatactggatccatgctcgttccgcttgttcttcgatggtttcgaccacttccggcagtaaccccagcaggttgaagttacggcgttcttccatgctgaaggcactgcctttattcaacaacggaaattccagcagtacagggccagcgtaagggatataaaggctacgctgtttttttgtttttggttccatgtcactcactcttttttgaatatccatccctggggggcttttatcgtctttgctttaccgccagggcgtcggcctcaagtataaagcagataaaaacaaaaacaccattgcgcaggcaatggtgtttaatcgtcattgaggactgatggttatgaattacttttcagcggggcgttttctgccggttgggttatttactacgctggatttgtcaccttcggtaactattttgcgctggttagaaattttatggtccagtccaagaatatgacgtgcctgacggttgcttttcattttaactcctcaatcctgtagctagttttaaggacaacatcgccgtagcgaagaaacacgtgctaaacccctaaattaggttgccgatcaagcatagcaccttaaagcgtagggtgctggccactgaccacataattgatcgtttgctggtagatatcactgaggatgtcgttatcagaagcttcaacccatttggtcagctccatgagaatgtcatcttcagtgacaacaccatgctgtgcccgaaggccttgctcaatggcattaaccagagcgggttctgctgtactattttctgcctgataataagtaaacatagtgattctccgtgtctgtgtatttatggtgtctgctacggatcgcagatttataaagcacattcagcatggcaaatatttgccgcttcgttgttaagattagtcctggttgatgatttttatattttaacaccatgatattcatagggattgtgattggtatgatccgattaatattgatacaatatcttttgggttatatattcccggtaatctattgtgggaatttaatttaagtgcagaagtaatattttcgccggattttattcggaatatcctgcttatcctcgtgctgtttctcacgtagtctataatttcctttttaagcccacaggagagcaacaatgacaatccataagaaaggtcaggcacactgggaaggcgatatcaaacgcgggaagggaacagtatccaccgagagtggcgtgctgaaccaacagccgtatggatttaacacgcgttttgaaggcgaaaaaggaaccaaccctgaagaactgattggcgcagcgcatgccgcatgtttcagtatggcgcttagtttaatgctgggggaagcgggattcacgccaacaagcattgataccaccgccgatgtgagcctggataaagtggatgccggttttgcgattacgaaaatcgcactgaagagtgaagttgcggtgccgggtattgatgcctctacctttgacggcataatccagaaagcaaaagcaggatgcccggtctctcaggtactgaaagcggaaattacgctggattaccagttgaaaagctaaagcattgccggatgacgcgtcaggcgcgtgaatgcctgatgcgttgttagcatctttacagcgcccgccagcaccggagctcacgtccgtcctcccttattgctaaactttgccggacttcacatccgtgggttgccagcgggcaacgttcgtagaaaaaacagccttgcggcaacgtgcggtttcccggcagatccgttttacgtaatgcccattcttcctccagcggtttatcaatggcggggagggaatccagcaataatcgggtgtatggatgtgcaggtgccgtcagcacctgctgcgcgtcgcccagttctacaatctgcccgagatacatcaccgccacccgatcgctcatatgacgtatcacgctgacattgtgactaatcagcacataggtcagcccgtgattttcctgtagcgttaccagtaaattgaggatctgcgcctgaacggagatatccagcgcagaggttggctcatcaagcacaatcacgtcaggctggctagagagtgctctggcaatggcgatacgttgccgctgcccgccggagaacgcatgaggcaggcggtcgagatactccggacgaatacccacctgcacagccaactcctctgccaacgctcgccgctgttgttcactactacgcttagctatccagagcggttctgtgatgatgcgccacaccggtaagcgcggattaaggctagagagcgggtcctgaaacaccatctgcataatgcgttgactgccagaacggatgtactgcccgtggctcggttgcagcatacccattaaaagctgtgcgagggtgcttttgccgcagccactctcgccgacgatccctaaggtttcaccacggcggatctgtaaatcaataccattaatggcatgaacatgttccgtagttttaccaagccagtttttacgggccgggaaattgatatggacgtcgcgtaacgttaataacgtgtcagacacttataacctcctgctgcggataccaacaggcacagcgctggttgttgtcaccacacgctgtcagcgccgggacgttttcacactgtgcacctgccgcatagcaacgatcgcgaaaagcgcagccgtcaggcaaatgggtgaggtttggtaccgtccctggaatggcgggtaatagctggcgtggtactccatgttctggtgcgcattgcagcaaaccaatggtatacggatgccggggatgatggataacgtctgccgtcacgccgctttcaattacgcttccggcatacatcacgtaaacgctatcgcacagttggctcaccacggccatatcatggctgatgaacagaaccgcagttccactggcgcgggctttatgtttaagcaaacgcagtacctgcaactgcaccgtgacgtccagcgccgtagtcggttcgtcggcaataatcaattgcggctcgcaggagaatgccagcgcaatcattacccgctggcgcataccaccactaagctcaaacggatagcggctcataacttccacggcatccgggatttgcatctcttccagcaggtcaatcgctttagctctggcttcccgacgacttattggttgatgatggcggatcacgtccatcatctgaagacctattcgacgtgtcggattgaggtcggtcatcggttcctgaaagatcatcgccactcgtgcgccgcgccactgacgaagctgtttttcccgcgcgttaagaacatcttctcccagcagggaaatctgcccccgatgtacgcaataactgcccgtcggtagcagacgcataatcagcattgcggtgacacttttaccactgccggattctcccaccagaccgacaatttcaccgcggttaatctgcaaggacacattgttgagcgcgtgaacatcaccgttaaaaccggggaaactcaaatgcagttgttgaatgtccagaacgggttgggtcatgactgctttcctcctgctttttagttcaactctgctttcctcctgctttcgggtcaagcagatcgcgaataccatcaccaaagagattaaacccgacggcggtaagcaaaatcgctgcccccggaaatgcgcaataccaccactgatcgagtacatagttgcgaccatttgctaccatcgcgccccattcagcactcggttgttgagcacccaggccaataaatcccaacgtggcggccattaaaatcgcgctaccgatatccaggcttgcctgcacgatcagcggcggtagggagttacgtaaaatatgccagttgatcagatgccaacgagacgcgccaaaggttttcgccgcctgaacataggtatactggcgtacaactaatgcttgcccccgcgccaggcgcacataaaagggaattcgcacaatagcaatagccagcatggcgttaaacaaactcggcccgagagcggcagccagtgccattgtcagtaccaagctaggaatgctcagcataatgtccatgatgcgcatgatgatggcgtctgcgcgtccaccaagcacaccggatagacatccgagtaggctaccaatcatacccgcaatggcaaccacgactaatccggcgagaatactttgctgactgccgaccagtacgcggctaaacagatcgcgtcccacttcatcggtgccaaaccagtgcgccgcagaaggcggcaaaaggcgggcggttaaatcaatggcgttgggatcatgcgtcgccagccacggactaaaaatcatcatcaatagcattaatacaatgatgactgcgctggtcacggtgagcggactgcctttcagcatccataccagttttgcaccgttaaatcgcgtttgtttttgtgggcgtacggcggacgtttcctcgcttagcatcattcaccacctccacgtccgatacgcggatcaatccacaaatagagcaaatccaccaccaggttgaccagcacataagcaaaactaaccacgacggcaaagcccatcactgccgggaagtcgagcgcctgtatacttgttactacccatgcacccattccgggccaggcaaaaacggtttcggtgagcactgcgccatacaacaaatcgcccagcgccaaacccaatacggtaatgcttgggatcaacgcattgggtagcgcataacataaaacgatataccagccgggcaagccgctggcccgggcggtacgaatgtagtcttcactcaattgttccagcatcgcactgcggatctggcgagcgacaattcccaggtgaacgaacgccagcgttaatgccggtaagatgagatgttgcaacgcattgaagaagacttcaccgttgccttcaagcagcgcatcgagcagataaaagccggtaacgtgcgttggtggatccagccagtcatcaagccttccgccgccgggaagaatttgcagatgaccataaaacagcacaatgacgcccagcccaagccagaacgcaggtgtggagattccggtaatggccattattcgcaccagatgatccagccagcgatttcgccagactgcagagagtatgcccagcgggatgccaatcaggagtgccagcagcagggcaccaaaagccagctccagcgtcgccgggaaaaatatacgcaactcttccagcaccggacgcccggtacgaatggatgttcccaggtcaccatgaaacaggtcgctgacgtagcggtaaaactgtacatacagtggctggtccagtcccagttgctggcgaatattttccacgatagcatcgctggcgcggtcacccgccagtaaccgcgccggatcaccagggatcagatggctgataataaacgtaatcacgcagacgcccgccaccacgagcaccagcccccagcagcgttggcgtaaaatactccagaaggtcacgttatttactcatggtattgatattgaagacctgttccagcatgggattgaacacaaagcctttcacctctttgttcatcgccagttggtagtttttctggaacaggtacacataagcagcgtcatcaatgacgattttctgtgcctgctggtagtcccgggtacgctgcgtctggtcggtggtcgcaagcgcattgcgcagtaacttatcgacctcactgttttcatagaagctgcggttacccggcagaccttttttgtcactctcaaaccagtaattcataaacatatacgggtcggcaaaatccggactccagttgccaatcgcaatgtcgtaatcacctttacccactctgtcgcgcatggtggcgttcgccagcttttccagcttcacaatgatgcccagcttgttgagactggattgtgtcgccagagcaataggctcccagttcggatcgttatcggagtagagaaacgtcaggctggtgggtttgctcgtcactttatcccattcggctttggctttcgtttcgtcatggttgtattgcattgccgtcgcatcgtagccccacatgccttccggaatcgggccgcgcatctgttttccgttaccactcagaatgccgttaaccatgccctgataatcggtagaccaggaaatggcccgacgcagatccgcctgattaagaggcgctttgctgttattcagatacagataggtaacgcgcagactcggatactctgccacattgactttattttcctgcttcagggcgttgagttgatccaccggcagcgcatcggcaatgtcaatgtcgccacgggagagctgcaggcgacgggaggcactttcaccaataatttttacgcttacccgtttgaagttcggtttattgcctgggtaatgcggatttggcaccagaactaattgctgacctttttgccagcttttcagcataaatggtccggaaccggcggtattttgcgcgaggaagccgcgagcatcatccgctgcatgttcctttaagaccgccggattgataatggatgcaccgtcattcgccagcgtgtagaggaacggtgcgaatggttggctaagggtaaacttcaccgtatgttcgtcgggagcatcaatctttaaatctttgggaaatgcttctgctggcccctggccgatttttagtagccgctcaaaagaaagttttactgcttcggcagtgacaggtgtgccatcggcaaatttagcattatctttcagggtgaacgtccactctttttgatcgtcagacgctttccagctacttgccagatcgccttcaacgtcggtactgcctttatcaccgtccgttttgtactgaaccagccgctgataagacgggtaggtcactgtccagtcgttattatctattgttaccgccgggtcgagggtttgtggatcggcggccttaccaatcaccagcatatcttttggtacggcggcgtgcgcaaccgggaaatttgtggcaaggacgagcgcgagcaatgtgggacgaaagcttatgcttctcttcatgacagtttcctgattaactgacgtgctgtgtgccaggggatataaaacaagagaattgatcagcgagcagagggtaactcgctgcctggggtaattcgaagtgccaccattcgctggagataccgacaaaaccgccaccagtcattatcgcattcagcaacagccgattgcgctgagcggcgggcgggacggaagggtgataggcatgggagcgctcgtgcatttcatcgaaccctgcgcccatatcgaggatgttcccgtgctcatcacgaagcgtcaggtcgatcgccgtgccacggctgtgattagaaccgaccgtcacatcaacaacatattgcgggtctgggcaggcttgccacaacatcgcctgtgcttgttgtgggcgatacgcatcgtaaatcaccagttgtaacccactcagctgggcgatgctgatacttttcgccagcgcggtaatcgcatccttgtgtaacagacaacgcgcttgctgataaatagctttacctgtgatgttatcagcgcaggcgtatttcaattcgatctccagatcagggaagattacggctaaatcaaccagttcggtggtatcgctcataaacggttcctgtataagacaaaaattgctgcgctttccgcttatgcagatctcatgccatgccgggataagcgccagaatgctggcttaaagttatattttttaacttttgatcaacatttgtgcagcgtagtgcagttttggtgcaagaggggaagttaaggaaggaatctcccggaatcgtagctgaaatcacagtatttaagtgacagtgtcacgttaaatgaaaacccgcgagtgcgggcgagaggaatttgtcagattttcagcggtaacacgctgctcatccagcctggaatttcttcggcgggtagggggcgggaaaagaaatatccctgaataacgcgacagtggatcttgcgtagcatctcaaattgctctttggtttcgacgccttccgccacgacggttaaattgaggctttgcccaatgctggtaatggcttcaagtaaggcaaggatgcgtttttcggtcagacaacgatcgacaaaacttttgtcaattttgatttccgttaccggaagactgactaagcgggataatccggaaaagcccgtaccaaaatcatctacgcttaagcccacgcccatatcacgcaggatctgaatgcgcttaaagatttcggtatcgtgttccatcatcatgctttccgtgatttctaccgtcagctggtggccgtcaataccccaggcgtgcattgcatcagacacctgattaggcagttgattactgcgaaagtgcagcgcgctcaagttcacggataacgccgggatatgaatattctggctacgccattctgctaactgacggcaagcttccgcgatgacccagcgcccaatattttcgatttcaccaatctcttctgcgagaggaataaaccgactagggggcacatgaccatgcaggggatcgtgccagcgagcaagggcttcgatgccgtacagttcacccgtttctgcgaagatttgcggctggtaaaccagtttcagttggttattgctaatcgcttctttcagcgctgcgcctaaaaccaaacgctcttttaccatttcgttcatcgccgggctgaagaactgccagccgttaccgccattcttgcgaatataatccattgcattgtgagcagtggagagcaagtaatcgcggtttttacccaggtcgtagctgatgccaatactcaaggtaagcgggaagggtttatcgtcaatcattatcggcttgctgaccacattccgtagctcatcggcgatttgggtaatgttactgacgtcgttttcgaggctcacgaggacaaactgcgtaccttcgatacgacagagatactgatccggtttgagtttttcacgaaagcgattgaccacttccagcaatgcctgatcggcccacgcatagccaaggctatcaatcacatcctgaatatggtcaacaccgatgagatacaccacgggagagacggctttgtcgaccaggtcatcgaggtaattgtgcaggttattgcgatttggcagaccggtcatcggatcaaattggatgagttgttcaatatgctgacggcttttttcctgttccagcgccagcgcggccatatgctggctgatatctgccacgcgttcgataaaggcgctggtttctgctccactgctggttttaatttgcaggatccccgcaggcgcgccatcacgctgacgaatggtcgcactccagctttgcgcattttgaatttctgcaccgtgggaagaactcgcccagtgtatcggcatcccgttgcgcagtgcgaacaggctaacatggctttcgttgagtacagattcgatgttacgacaaatgatttcccccatttcatgaaatggcgggctgctgcacatggcggcgagaatattgccttcaagctggcgaatctgccgttcttcggtgatatcgctgaaagtcattaccaggttctgcagatgcgcgagcacgtcataaaccgggctgatagaggctttaatccagattttttcaccggtgcgcgtcaacagcagaaattcgtcctgatcgcgggcggttttccatagcaactgttgtaaacgaatgcggttatcggcagggaattcaggaatgttcaggagtgtatcgggctgcataccgctggcttcgctaatgcagtaaccaaacatttcggtaaatgcgcgattgcactgcacaatatggcgttccggatcgaggacaatcaccggtcggtcgagatggtcaacggcaataatcaattgtcgggtctgttctttttgcgccatttctacgctggcatcccgtaccagcgccaggtaataaactttcccctcggcgctcactttgcttagcgcaaaacgggtccagattttactgccgtcttttttctccagctgcagctcccgactcatcccctcaacacgcgctttaccgccttcacggttgtgacgaatgtattcaggatgcgcaggacgcaaatcccgcggaatcagcatatcaatgttattgccaatgacttcttcacgtttgtatccccagagcttctctgcggcggggttgaaaaacatcacttcatcattttcgttaattaacaccgcacccatcatattttgctcaagggcggggaaaaaaatgccatcggcggcattatccgcatcggttagcttcatgattacctctgcatcctggcgcatttaaagactggctttccagagttcaacacggtttctacctcgtcttttggcgatatacagagcttcatcggctatttgaatgaggcgctcatagtcaggatgaccattaaacatggcggcaccgatggaaagactgagggcaatatcttcgccgtttgcggctttcagtttggttttctccacccgactgcgaatacgttctgcggtacgtaacgtttcgttttcagaagcttcagtcaaaacaatgataaattcatcgcccccgtagcggaaaacataatcactactgcggacgttgtcataaaaggcctgagagactttacgcagaatttcatcaccagtgttatggccccacgtatcgttgatctctttgaatttatcaacgtcaataatcagcacactcagcggtgtaccggtccggttggcatgggcaatttcgcgtttgaagatagtcggtaggaaacggcggttaagtaatttcgtcagtacatccataccgacttcgtggcggcttacttcttcaaacaattcacgcagcaaggtaataatttggcttacggtatttcttatctgtaataaaaatttcacccgcagacttctgttattcaaatttctggtgttacgcatggtttgattgaaaataccgtcgaaatcctgaatcagacgggagatatggcctacttcggcaataccactaaaataatgtcgacctttatggttaaaccacaggccaaaatcagcctggcttaaaggcaaactactgcctaaatcagaatccagcaggattttatagataatatctatttcccaactaagtatactggctatttgccgttctttttcttcttcggcgttttccagtaagctgaagatacgatagttttcatcttccttactggcactactgtcactaaaggtaaacgcgcgagtcatcacttccatcgcgatatcaatactgttaatgctgaaatggtagacctgaagtttttctgcggcggaataatcgctagagaagatcaccggatagaggatttttttcagcacccgaaaccccatctcgacaatttctaccggaattcctatgcgggcatgcacttccgcgacggtatgctggatttgtattagcctttcgacatcgtcaacctgggcagaaagcacgttaataatccagcgttccatcgcactcttcaactgccgctcaacttgttcattactcaagaattcttcggcatgcgggtcgatgcggacaattcgataaaactcgatactcagataatgagcatgcgcaacggcaatttccgcggctttagcacgaatgggcggatctgcctgttcgacaagtccggtccactcatctttcattcttttaaaatacatctccataattcacacccttataaggctgggaaatcagacggaatcaaaatgaaacgcaacgtgcgagatcgactaactgcaccatattctcctgaaatatgaagatatactgaaaagaaataagcgatttaggacagtttcaatctacgctactgttcttcagaagagtatagcccatcgtaattatttttcggtgacagcgaatatcgtatggtttttcatattcatacatttttattagggatttatggctgtttaactaagtgtggttaatttgacttaagtaagcatgattattagtgggatagtttaagagggtaacaagccggtgggtaaagcaccggcttgttacaaagtaagaatgggagtttaactgccccagcgactttgcagatagctgaccgcttgttgagtctgcggtttattcagatagtcctcacggaacaagatggtgccgctaatttcgggcacagcatcgttaagatcgagctgctttttcagttccggtacgccgccgttaatcatccagtctggctctatcttactaggttcacccactttatagaaggcgataccgatatacaggcgggtcctggtcggtttaacgacatccgcccaccattttgccaacacgtcataacgcgcggcactccgactgaacggccagtaaatttggggagcaatgtaatccagcaatccttgttccacccatcgacgggtgtcagcgtaggattcgtcataggctgccgcgcctcgggtatcggaaccgagcggatcgtgacttcggttacgccacacgcctgccgggctaacaccaaattcgactcccggcttaatgcttttaatggtgtggcttacctttgcaattaactgctgagtattgttgcgccgccagtctgctttactcgcaaatgcgcctccgtatttacggtacgtttcgttatcatttagccgactacccggactctccgtatagaaatagtcgtcaaactgcacgccatctacgggatagcgggaaaccacttctgcgactatacttgtgatccagtcctgaacctcagggatgcccgggtcgaggacaaagcgatcgccagacgttctgatccagtcgcggtgttgcacatagacgctcgccggttgttgagacagagtgctattcagttccctgatagtaccgggcttcgtattaacgcttacgcgataggggttaaaccaggcgtgtactttcatcccacgcttgtgggcttcgtcgagcataaattgcagcggatcgtaacccggattttcaccaatcttaccggtcataagatcggaccacggcaaaattttgcttggccacagggcggtaccgtccggcttgacctggaaaaagaccgtgtttatgccgagacgttgcagatgatccagtttgtcgatcatcgcctgttgttgtacacgggcccggctggtggggttactaatgttaacgctggaaaccggtggccagtcgagccgagaaaccgtggccagccagatgccacgcatcggttgactgctttgttgcgtcgtggctggtggcttactacctgctggtggtgtcaccatggactctggaggcgtgcttttacaactacacagtaaaagtgccagtgcaactagtatcgctggtcttctaatcgttaatttcttgtttcgggagcagatatccatatgtgctggtttccggtaaacagatgtgcgctcattctcgtacttatccccgttaagtcaatacgacagcaagcacgaaaaagggagcgatgaattatcgctcccttgtcttataaccattcagacatggttagtgtttcttgtcattcatcacaatatagtgtggactacgtgcacgcgggtgcagggagaagtgaccttttggtgcgttctgactgttgattggctccagagtgacgccggtatttgctttgcctttacgatcatgaacagcatagagaataaagggcagggcaagtaccaccaggaaactaacaaccagtaattcaacatacatatcggtagaatcaccctggatgttatccggcggcaggaaggaaacaataaacgccataatactagtcagcagaccgacaattgccacgaccagtttcacccctttaccaccagggatattaaatgtgcgttttaagtcaggatgtttaagaaccaacacaatgtagccaataaacagcatgaaataagcacacagataaatcaccaccgtcagcgccagtgcgatcaggaaggacatgttgttaccgccaccggtattggtgaggatgatcaacgcgatagacgtaatcaccagctggctaatgaccagcgttaccggtacgccatttttgttcattttagcgaatgccgctggcagcaggtttttctgcgctgttacatacatcccgcgagaaggaccaacaatccaggaggcgatttccgccagaacacccagcaacagcagtgcggagatcacgcgaaccgtccactcaatttctggtgccacatgggacatcagaacggtaaaggtttgcattacccctgcggagaggttgatttcattacccggaatgaccatcgcaatagacaaaccaccaacagagcttaagcagattgccgccaccatcagcagtaacatagccaacggatagtcgcgccctgggttgctcatttcattgacgtgggttgcggatgcttctacgcccatataactcaaaatgaaggcaacaaatactaccagggtgcccactttagagaagtcagggaagaaggtcttgctatccatttcgatagcaacgggggcaccggagtgcagataaatagccgctaatgcgatcaaaataaatgcaggtaacaggataccggcgaagaagccaactttagcaattcgcgccgtgtatttcgtgccaccaaactgcgttaatgccagcgcccaaagaatgatgagtgctgcaatagttttggtaatggggtcttcattcagcgctggccatttcaggatgtaggagagtgcccctaacacgaaatagagcatcggaataaaaccaatggcgatttgcagatagccaaaactgatcgctgcaaatccccatctcggccccagagtattacttacccaggcgaagacaccaccttcttcccagccgtcgacggtggccatttccgcagcacaaagtcccacgggaataaaccataaaatcccgcctaatagcaggaagaagactaaactaaagccgcttgttgcgaaggtagggtattcataaacagccattaccatgcttgccgttatggcaaagaatccaagtaatgtgagctgcttagctttacctgtctgtacacttgtagccatattatccccctaaaacggtattcctgtcggaaccgcacctgttttgttctgaagcgtattcagaacaatattttccgttgctaatgccagtgaacagactttggaaattgtcccgaaacgggttcgtttcgggacaccgttaccgttaaacgttatcaggtatgtttaaagctgttctgttgggcaataccctgcagtttcgggtgatcgctgagatatttcagggaggctttgtagtcttccagcaacagttcagcaaagtccatttcgaagccgcgacgacacataatgcgcatcaccacgatgtcggtggcttcaccgccgagagtgaaggccggaacctgccagccgcgcagacgcagacgttcagagaggtcatacagggtgtatcccggatcttcaccatctttcagtttgaagcaaaccgccgggatgccttcgtccgggcgacccgtacagatgaactcatacggccccagtttggcgatttcatccgccagataagcggcaacctggtaagaggcgttctgtactttggtatagccttcacgaccgaggcgcaggaattcatagtactgtgcaattacctgacccgccgggcgggagaagttgatggcaaaagtaccaatttgaccacccaggtagtcaacgttgaacaccagttcctgcggcagcgcttcttcgtcacgccagataacccagccgcagcccagcggagccagaccgaatttatggccactagcactgatgcttttcacacgcggcaggcggaagtcccagacgatatccggggcgacgaacggtgccaggaagccaccgctggcagcgtcgatgtgcatgtcgatgtcgataccggtatcggcctggaatttatccagcgcatcgtgcagcggttgtgggaactcatagttaccagtgtaggtcacgccgaaagtcggcaccacgccgatggtgttttcgtcacaggcttcaatcatgcgtttcgggtccataaacaactgaccggggcgcatagggatctcacgcagctccacatcccagtagcgggcgaatttatgccagcagatttgtaccggaccgcacaccaggtttggtttatccgttggtttgcctgcagcttccatacgcttgcgccaacgccatctcatcgccatcccgccgagcatacaggcctcggaagaaccaatggtgttggtgccaacggcctgaccatttttcggcgcaggcgcatgccacagatcggcaaccatatttacgcaacgcaggtcgatggctgcggattgcggatattcttctttgtcgatccagtttttgttaatggataaatccatcaatttgtggacattttcgtcgtcccaggtctggcagaaagtggccaggttctgacgagcgttgccatcaagatataattcgtcattgataatctggaatgcgacatcgtcgcgcatttcgtgcagcggaaaacgtttactttctgcgatagtggaaatagacttcgcaccaaaacgactatcgagtagttcgctccttaaatccgttacttgcttcttatccattttaaactccttaaaatgattggatcgcattaaaaaagtaggatttatcgataaagtaagcaagtgcaaaggactcgtgtttaaataacaaaatcctaatgttatttatcgtgagatattacgcgaataatattttttcattgaaaaacaatacaatatgaaattcttgggtggtggtaaggtgttttatgctgttatttttatgcgcattctgtgtctcctgaattatcacgtaaaaatcagaccttaaaatatcactattagtacttgattattattttgaacgcatttataaaattattacataaaaatagcgaatattgctaaaatccccgccaacgatgtgttgacggggctgttattattttggcaataatactccggtataagtatttaccggatgagaaagatattgtttaacggcagtgttaacattctctaccgtcatttgtttcaacaattgctcctgctcagtccatgctgcaggatcgtcatattgaataagactatttacaatagtgttcgctaattgttgaacgctacgctgttggatatcgaggctgcgctgaacgttttgctggtattcattcagttcttgctcactgatccctttagccagacgcttaaccatcacttcattcgctaacgttaacagttcatcatgtcgttctggttgacaagtaaaagccagcaaatgactgatatctttggcctgaggatcaacgctgaggcgagaagaaacgctgtatgctccagatgcctgttcacgaatattaacacgtagatcttttgccagtgcgacgttaaaagcatcgagcgccatacgcgtcggcagattaacaggtgtccgggaatcataacgcttccactgactaacctgtgccacaggttcattttgttcttttacagtaacgcttgcgttgtccgtcgcgcgagttaatggtttacctgcggctaatgggctatcagagtgtttgatacttcctaagtaacgcgtaattaacgccacgagtttgtcttctgcgacattaccgacaatgacaaacgtgatatccgctggagaactaaacaattggcgatcggcagccagcgcatctgcggcagtaaactgtgcaatctgattttcttgcagtaatttcgtgcggtcatcagcatagcgcgtctcatacatctgctgggcgaatttctccgctggacgctggtcgagcgttttcaacgcctgaatttgagcattttgtaggcttgcccaaatattatcgttaatcgtgctgtgggtgattcgctggttaatcaactgaaaaccaggttcagggttattagtccgcgcgctaacggagagcaacgtattcatgccactgactttactgctcatggttacgctattttccgcactccagcgtttcaggctggaagaggagagttcgccaacgccgcttccgctaactgctttatttgccagcgcgataagacttttttgctgcgcagggaaacttaaatcgcctttattgcttacggcaataatttgtagcttttgctcttcacccgcggattttgccagaataaccctggcaccattggaaagtgttaaacttgtcagattctccgccagcgtttctttgctgctaatttccgcctgtgggtctgcgtctactgttaagcttaaatttctgcctgggaagacgtaagccgccagctttttgttggcgtactccttttccagcgccaggatagccgcaggagacaatgcttttttggcggcaacctcattgtttaccatttgctcccaaaatgcgtcctggttctttcttaactgctgccatttttccgccagactttgcacggtaatttgctgccacagacgtttgctaagttgatatgtctcttccgggctcaagaacggcgtattatttaaactgctggatgccaggcgactggtcagcatacgtaaatcacgttcagcttgctgatcaaccgcatttttcagccaggtgaggcgggtagatttgacatcatcgagttcttcagcagaaaaaccatgctgatcaatggttgccaactctgccattaatgcattcgcagcatcctgcatattatcgtctcgtgcatttacacggaaaaacaggctctgataatcgggtgcaattttaacgctgcgcgcagtgccgccagaaatagtcttcaactcgccgctctgtatgcgttcctgcagacgttgattgaacagctgaactaacatgctccattcagcttgttcgataaagctttgctcatcgttcacttgtaccattggcaggcgataatagagtgcgatgccgttcacccggttttctttatcattaatgatattaaagcgcaggtggttttcggcttttgtcggccagacgcgattttcagctgctttgttagccggaagcttacttaaattatcctttatcagcgccagcgcttctttactgtcgatatcgccgaccacgataaaggtcatattatttggttgataccagcgttgataaaattggcgcaattgtgccggtgtgaccgtggcgacagtatccatcaggccgataggttcacggtctaaattacgggtatttgccagcaggaaagggcggcgcgcctgagaggtgcgccatttcgcatcctgatgggcacgccattcctcagtaattacgccacgttcagcgtctacttcgagtttttcaaaggttgcggcattactccattcactgaagattgccatcacttgttgcagattttgtttctgcgtagtcggcaaactcacctgatacaccgtttcgtcatagctggtataggcattaacatcgcgaccaaaacgcaggcccatactctcaaatgtttcgatgactttattacccggccatgtttttgtgccgttaaacatcatatgttctacaaaatgagccacgccgagctcattgtcttcttcctgcaaactaccggtatgaatttgcagccataaatttacctgatcctttggatgagcatgcggataaatcatatatcgcaagccattgtccagttgcccggtaattaacttttcatcctgcggtaaggcggcggcaatcagccgcccggggagcaacagagttgccactaacgtcagtaagaaacagaggtttctcataattatctccatgcgaaaaccgggcgaatttacccggttaagtaaaatccgaactattaaaatttcatgctgacatcaagccagaaagtacggccactggcgtaggtcgccacaccggtgttcgttgtatcaacagcggttttgctatccagtacattgagaatatcggcactgatcgtcaggttttgttgttgcagaaattgtggcgtccaggacaagcgggtgtcccaggtcaggctgctatccagtttttcgtcaacatactgcttgtaatcactatattcgctgatgtattgcgcatttgtcttaccaaggataatgcgagctttacgcgcttcttgccaggccagcgtattcgcccacactaacccgctcggttgatgcgtgaaatccatgtttaaggagatctttaatgggttattaaaatctgccactggaacgctatcgtaagagaccagattaccgttataaaccacctggttatcaccggtattgctctcctcataaccattgtttaagctcaagttgcccttgctcttgatatagctaaagacaatttgtgggttaatatctacctggcggatatgcaggggttcggccagttcaaaactgaggctgaagctatgcgttttggttttgccatcgttgttatattcagtaatggtggttttagtcgcgctgtcggtacgactgcttttgctgatttgatcatgcgcttcacggtaaacatagtttgcacgcgcaataacgttcttaccgattttctgctgcaatcccattgccagttcatcgttataaggcgttttcaaatcctgataacgcgtcagagttttattaccacttacgctttccgtccagctattgcggatatcacgtaatcccatatcaagaatattcccgccatagtaacggttataacctgctgtaatcatactggtttgattagcaaaaatatcccattccgtcataaagcgcggggagatattgtggttactcagatagttgtcatagtcataccgcacgccgggcattaaactcacattacgccagctaatgcgatccgccatatacagcgtgtagttgtcaattcccaggcggcctttacctttatggtaaatggtatggttagttttctttccggcagcattaatcacataggattcagactggttatggcgttcagtccacgcatcggaatagatgtattccgcgccgaagtagggttgatggctaacattacccacggcgaatttttgccagtccaggcgtgttttgaaggtgtaattatctacagcctgggaaatgtgtcctaatccgccacgggtgcaacgccctgtaatatcaccatatgtacaactaagttcggtgtaccagatgtcatgatcgtgacgggtataatcactaatatgatcccaaccaacggtggtacgcagtttggcccatgcgagctgcgtatccatatcccatgccagaccataggatttattacccatttcgcgatcagactgcgggaaggtgctggtattataatcacggctggagccggtatattttaaggttaaatcgtgggtaaagcggtcgctggcaaaccaggtaaatttgcttaatgcagtatcgataacgtttttatactgtgcccgaccggcgacaatgccgtcattgctaacataatccgcgcgggtgatatcagactggcggcggcttaaaccggcggtaacgccgaagttatcagcgagttcctgattaaagctcaaggtataaaagttctttttaaaatctggggagtaataagtacttccactagagccttgattaaatgcgctcttgttattctcatcgatatggcttgttaaccagtcgctacgcgtagtgcgataacccaatttcaccttgctatcatcagcgttgaagcgtttgatctttgcatcaattaccccgccattgaagcgaccaaattcaaccggcacaaaactgtcataaagcgtcacattgtccagtaagctgacatcaagataatacccctgactcatcccgctaatattggttgcactactggcatcggactcattcgctgggttcaggttattagttgcactaataccgtcaatcaaataggcattctggtaggggctcgcaccgtgaatagagattttctcagggcgaatatctccctggttcaagctggtactttgcgtactatccatgcgtaccgcagggttggttctcagcagatcgctgatattgccattcccggtcggtaaacgctcgatgctttcactggtgtaatgcgtgttgccgtttacgggtacagggacaggagcatagaccgtcatctcttcaaaaaaatgcatgtacatgtttttgtcatcgacggcctgcgccacatcagcgccacataaaatgacgccaggaataagaactcgcttcatttatttatatctccgtacagcagggcttttattgtttttataaaaccgcgctaatgtcacaaatatcatcggccaggttccagacaccgggttgatgtgtaaccataatgacgccgcttgtgggtagtttttcacgcactaaacgcagtaagcggatagcctcttgttcctcaagatgagaggtagtttcgtcaagaaatatccatttcggacgtcgtaaaattaatcgtgccagggcgatacgttgtttttcgccgctggaaagaatatctccccagcgatcgtggtcatgaatacgcgcagccaatttcccaagaccaacctgatgcagtacttcgctcaagcttttatcgtctacgggcaggggaagtgctttacaaataatctctttcagtaagccggttttgattaacggtgtttgactcacataccaactgtcagcaggagaagaaatatcacctttaaaccacggccagcagtgggataatgttttaagcagtgtggtttttcccgcgccagagtagcctttcagtaatagccatttgcctgggctaacatgaaagttcaggttctctaatatgatcttattatcaggcgtacgaatactcgcatcagccacttgtaccgcatgttggcaatttttaggcttattcgtagggcgctgttcagtgagttgatggaactcatacaagcgatcgataaccgcagccagttcagcaagttcgtcatatttataaataaaccagcttaaattgttgcttaccagcataaatgcctggcggcttttcatcagtccgcccagattgatctgcccgctaataaactgcggcaataacagaaagtagggaagaacgctaaggctgcggctataaatattctgccagtaatcaagccaccgctgacgattcattaaacgatgccagttctctttaatggtatgaaaattgtcgctcaactcctggcgttgtagagactcagcattgcttagcgcaatcagttctgcctgcttattatgctgcacaagatttgttcgaaatgtcgcttcgctacgttgtttttccacattaagcggacgaatacgtttacccaccttatgggtaaataaagttccaccgatcacaatgagcacgacggtatagaccatatacccctggatattccattctgttccaccaacagtgaaactgagcgtacccgcgctttcccaaagaataacggtaaaggtgatcagcatgctaagactctggatgaagccaaaactaagactgagcgttttgctgatcagtaagagaatgtcttcagcgatacgttggtcagggttatctgtatttttatgctcgccgtagatctgcgtgaagtagtagtttttatctgcaaaccaccgattaaggtagtaatctgttaaccattcgcgccagcgaatagtcagtagtttaattaaccatgttttgtttacggatattaatacaaagatccccagcagggcagggaaccaaaggacaagctgccaaagcttatcggtttctttctggcttagcgcattgaaaaaatcattattccagtcgtttaaccagacctgaattttaaccacgccaaggatcatggcgaggataataatgattaacaacacactagttttattattcttacgcagccaaaagggcttcaacagacagagatactttgctatcaacatacgaagcgtaatgggaatggttatcattagcgaaaattgattgtgccatccaatgattatctatggcaatgatttactgatgaaatttatttaagtatcatttaacaatatgaaatataaaggaatatttcattttcagtggttatggttatgctattgataatcaaggatattgctaatgccctgatgcataccacgtaagccaggattttcgcaagggaagatgatgatgacgaaacacccgacaggaatttatgtcgggtgccttgttaaggtcataagaaggaggctaagaatggagttaaaagagagcgttattaattattctccatttgttttgcaacatccataatgtggtaaagcggtactctgttcttagctaactctaccatggcgttcatataaggtaccatggtactaaaaaggattttataaccttcgcaaaaataagaaacagtctcattgtttactttagtaatacgatgcttaggacaaccgccattgcagataggtttatatgcacattgctgacatttcgctggaatccgttttttttgcgctgtcagttgtacactgttcatcgttttgagttcagatttattaatgtttccaattttgtactgtggatagacaaaatggtcgcattcgtaaatgtctccattactttcaacaaccagattatccttgcaggactcctggaaaatacaactggtatgcccattccccaaaaaacggctgacaaagctttcaaactgacggatgaaaatttcacccacatcgtttttaacccattgcataaaaatggtactcataaacttgccataagccgtgggaggcacagaaaaatcaatgatacggaatgtgttctcactatgaccactgaaatcaatattcggcgtcccggtttctagcaattcgataaattgcatatgtttactgccgatagattttaaaaaatgataaacctcaagagggtaatggacattaacgttattaatgacggttaacgtattaaactctacttgataacttttcagacgctcgatggctgctatcacttttgcaaaagtaccgttaccactattactgcgtctgtaacggtcatgtaactcctgggggccatcgatgctgataccaaccagaaattcatgttctttgagaaaggcacaccattcattattcaataaaatgccattcgtttgtaatgcattaaaaatacgtttttggcctgcatagcgttgttgatagtgaataactttacggaaaaaatccaggccagccagagtgggttcaccgccttgccaggtaaaatagacctgattgccagacgctgcgatatattgtttgatgaactctttcagagtgctgtcatccatccatttttcatgagtaaactggctctctttttcaaggtaaaaacagtaatcacatttgagattacattgaaaactggagggcttggctgtaacgtgcatcgctatctcgctcaataaggcggcggaaaaatccgccgcatgaaggtttagttatttcgcttcgcttagtgctttcttgatattgttaaacttctcctgatttacctcgctaagcggtggctggctgctgtcgataaactctcttaccacgccttgcatctctttaacgacctgcggattggcggcggcaaggttatctttttgctgtagatccgtcagtttgtagagacctaactgattgttttctactgtatagacaaggctataatcgttatttctcaccgtataagagaattggcttaagtcctcagtgttggggttatgcgggtaatcgtcactctgatggcgaacaaatttgtggtaattatcccagaatggaatattttcctcgtcaaaccagtgagaataagaggttatccaggtcagatttttatgtggctcgccttgtttcttatcttgcaaccagggcagcaaggaaacgccatccagcttaaggtcttttggaatgctgatatcggctgcatcaagagctgtcgggtagaaatccattgcggaaatcagcttgtcataattaccgggttgaagttttcctttccaccacataaacattggggtgtgagtaccgccaggataggtctgactcttatagcctttttgcgccccgttcagcggcagaggaccatcgataaccgcaccattatcggaggtaaagagaataattgtattgtcatactgtccgtttttcttcagttgttcgagaatgcgttttacaccctgatcaacagaataaacggaagcgtagtagttatctgctgtttgactaccggtattaaattgcttctgatattgatccggtgcaggattatcatttggcaggtgcggagcattataagccaggtaaagcataaaaggctggtcaagtgttttggcacgatcaacaacgccaattgcctcatcggttaactgatcgctgatataaccttttgcggggacacgttcacgatttttgaacagactaggggagttgtaatatgccgttcctgcagcgtggaatcccataaagtaatcaaagccacggttttgaggttgccattcttccgcagaaaatgtggtgaagttgtcatgatagtcacgcgtttgtttatcttccggtaccggcacattactgattttactcaagtgccatttacctactgctgcagtgtaataaccatgattctggaataattcaggcaagaaagtttctgttagcggaataccatcctgagcatcggtattggaatagacaccaaagcgggcgggagctcgaccggtcattattgcggcgcgggaggggccggaaacaccgtgtgccacatagccgttagtaaaacgtacgccttcatccattaaactaaggagcgtcggcgtacttttttgtgcagcttcaatggctttatctatccctattttgtaggtatcgacaacttcacgattttccattgtttttgggtcaaaagatcccttatcaaaaggaagttgtccataaccaagatcatccatggtcagtacgataatatttggctttcctttggtactgtattctgtcggcgtaaagtcactgaaagcaacgtttgttttggttgctttcagctttacatcatctgccgcatgagcagcaaatgcagccataccagatgccagtatcaaagatatgctggtacttacgacacttttctttaatgcagacttcataaatgttcctcttcttattgtacttaattccaaagtaattttacgaagagaaataagtggatgtaagtgaagttagtcacataaagagatagcagatttagctaaaaaaagggaaaaaacagtccataaagcgttgacattactttctgttctattaagtaatttctcgccgataaacaactaatttattgatatttaataaattattgcattttactgacaaaatgcagaattgagatcataaataatcatgcaacaggttatgcaagtgcataaatatgtgatggatgtcacttatttatttcaataaatatatcgcctaaaaacaacgcggggcagggaatggctgccccatttaattcttacgcagcgtgtgtggttgactactcgttagcaaataatcaaatagctaaagcattcatcgtgttgcccgtattcatacccgtgtgactttgacaacggtactccttagaaactctcttcggactgttgccgaaatgtttgcggaacgcataaataaaataagatgtactggcataaccacattgttcggcaattttattgacactaccttctacgcgtatcaaattttttgcgtgctgcattcttgcatctaaaagaatctgactgaatgtcgtttgctcttgcttaagttttttcttcaacaggctttcactgatgtacaggcagtcacaaatatctttcagcttccatgggtgcgccggcttcatgttgacaatatttctcactttcccagaaacggatagcacaccgttagttaatagtgtaatgaaacctttgcatgcggcaaaaatagacaggcaagaaaaaagcaaaagttcactaaaattatgatgattgcgttcttcgctgttgagataagcaatcatttcattaagcaatccagtcggtacattactagcacgtaaaaacttcgcaggaacaggcaccgtcactgtctggatgttagtgcattgtagatattttttaatggtattttcagtaaatccgatctctttaaaatgccgctcataaggttcaaaatgcgtacgaacagcgttatctaccatcaggatctcgccgtcagagaaggcgtaatctttatctaaaatgttagcgttgaaggcatgatgaataaatataacagaacaaacgaggctcattttatctccttaaaacaataaagtttttatcgatacttttttaacatttcatatttataatttgctgtttgttttcagccttgcaaactattgataatgaaatgtgtaagatctcttgcaatgcgacccatttctgaaatactcagctgatcaattgccgaaaaaatggctatcaacgtaagtgtcagtaataagacaaccacaattgcagacatgatttctttatagttgtctctttgcgtgattttgtttttcactgtggtcgcatgcatttcaaatatgtttatttagcggataacgttaaaaatcgttaatcagtatgcttaatataacaggctggagaaaagaggaaataggactggtgcttcagtactgagcggagtttcttacagctgtaggcagaagtttatatcttatagtatgtagtttaatttaatccatgtgagcaaattgcgaaataatagtcaatgaggaattcttctgctgtgcggatgacagcagaagaaatgagaagaggcattaattacttggttctaattcaaccggaatacttttatagccaggaatgccacttaatggatcgtggttatcaagtgttagcatgtgattgctttctggaaaataggtcaccagactgcggtcagccatagagtaaatgaccacttttaatctatccatgcggcgactgctgcgcttaccgtctggcgtaagcgcaataagattaactctttcgccgttttttacacggcaaattttagcttgtttagcactcataaagaccacatctcgttgaccgaatacccctcgatagcgatcatccataccataaatcgtcgtgttgtactgatcgtggctgcgtactgtcgccatgaccagcttactgttaaacgcactagagggatcttctaacagccctttgctggtaatgaaattagccttaccactcggcgtcatccagcgcctttcagcagctgcatttatcaggtgaaaaccaccgggatgacggatgcgctggttatagtcggcgaactctggcagcacagcttcaatgtcattgcgaatgcgatcataatcttccaccagatactcccaggctaccacgctctggggtagtgctgcctgcgcgattcccgcgaccactgcacactcacttttcagcattacaccggcgggttttaacacgccacggctggcatgaatcatgctcatactatcctcaacggttaccgcctgcgcaccgtttttttgcatgtcaatctcgctacgtcccaggaccggcagaatatagctatgccgtgcggtcaacagatgagagcggttaagcttagtggctacgtgtaccgccaaatctaattgcgttaacggtacagcgctcgcttcccgatctggcattgccagcgcaaaattgccccccatgcagatcaatgctcgagcctgccccgtacatattgcttgcatgctggtaattgcagcatgtccaggtgcatgaggtggggtgaagccatagcgctcacccagacgagccagaaactctgcagacggtttctcggtgataccgacggttcggtcgccctgtacattagagtgtccacgtagtgggcagatacccgcaccaggcttgccaatgttacctttcatcaacagcagattgaccagttgctgtacgttctgggtaccatgttcgtgctgagtgatccccattccgtaacagataatggtgcgttcggcagcggcatatgcgtcagccagttcggcgatttgtgtctgacttagtccagaaatacgttcgatatctttccactcggaattgagaacgtcacggcgtagctcgtcaaagccgacggtatgcgtttgaataaactcgtcatcaagcaaactaggccgacctgcggcgcttgcagcatcatcgcgctcaattaacaggcgcatcatccccttgagcaacgccatatcgccaccaatgcgcacgttatagtaggcactggccaactgagtctcagagttcgtcagcatttcaaacgggttttgcggtgcggtaaatcgctccaggccacgttcctgtagaggattgatggcgatcattttcgctccccgtttcactaaagcgcgcaagctagtcagcatgcgagggtggtttgtaccagggttatgcccaatgcaaatgactaaatcgcacttctcaaagtcttccagcaacacggtccctttacctacaccgatactcgctgccaaacccacgcttgtcggttcatggcacatgttggagcagtcgggaaagttattgctcccgtattcacgggcaaaaagctgataaagaaaggcagcttcattggaagtgcggccgctagtatagaattcagcctgattgggatcactatagctttgaaggcgtgcgccaatttcgtcgaaagcttgttgccagcttaatggcttgtaacagtcgctgacggcatcatatttcaaaggctgagtgagtcgccccgcagcctcaagctcgtggtctccccaggtaagtaaactttgaaccgtattctcagcaaagaaagaggcgtttacctgcttatccgtgacttcccaggcgattgcttttgcgccgttttcacaaatgtcgaaactcgcactgtgcttaggatctggccatgcacaacccggacagtcaaagccctctggcttattcatgtcaaacatggcaataacatcctggcgtatatccatctgcttacgtactgcattcgctacggatttaacagcaccccaaccacctgcagcaccctggtaggattcaatttttttcttcatctacttatcctgtgtggaaatgaattattaggatttgtaatagcgatgatgcacagtacatacaaagggattatcgccaacatggatatataagagtaggggactactctctttctatttttaatctattatcgttaaacaatagattaaatacgataagttaagcatcatctctcatagtgtttaaattaacatatttttcaatataaaaaataagactctggcttcaattgtgcgcggattttcttacaggtgtaggctaatagccttcacaaaataattatccgcgcaattttcgtgaatggagcgcatagactaaggtcaaaatcacaattattcatagataaaagtgacaccaatgacactctggacggttccggcactaaccttgtttcctgtttgtccataggttgcgcttaaacccagaggtactttgcttttatttactgtccccagggagacattttctcccgtagccagtatttttccattacgcattagagtgacacccactccgcttgcttttgttgcatcaggtgctgtgttagcaaacacttgtcggctactgtcagtggtggcaccgctaagataaaaactgagcttttgttcgctactgcaatatacgccaaggggtatttctgcgcttccaggaaagtccgggagatccacggtgacatttcgactatcaacggtgcagccgcctgttggcataacaacattgttattactaataatattccacgtaaaattacgcggatttccgcttcctaatgttgcaattttatacatatgaatacgggcaatgacttcccccgcttttatgacaactccaccggccgccccaactggggtaatatagagttttaacggtaatggcatcggtgtcttatcaccaatatccaatacgttggtatttgtcgtcaacgggaaggggtaggtcacattattccagtacaggcttcctttataactctgtagggagcctgcgaaagcactgccttgtaccaggtttatatgatcagtgtcgtaccagccgccgtaatcattccagcaacttatatgctgagacaagtctacaaccagattctggcccggctgtattacagggtcgagattaacataaacagaggttgtacctgctccaatactactcccgccatcgacattacaactgaaggcaaaaactttgcctgccattaatagaagataaataccgaacaggacctttatactgattgttttacccatgatatatcctaaggttaaaaattgatttaaaaagaaggctaagaaaatcgaatcgacgttattgccaggtgtagatcacattgattagcgcctcgatcgttccctggcttgcgtttccattcaccgtgatagctcttgccttaagtggaaactgtgcattacgagtgatctcatcaacaataaccgttttgctatcgccattttttaacgcagcatcctggtcatccctcagctctatctgaatattttcggcagtaccttcatttttgtaataacccgtattgtcagtactacctgtcacgattgccgtcactgcacttgtttcaaccggacaatcggttaaactcaaagtaatattgtgccagccagatgcagaaccaggttgttgcagattgcgcgtataaagatccccgagattaacgttagcttctttggtttgaatagtgcagggtttagcgactacccgaccattaacagtgatagtgacatcggcggcctggagagttgctgtgaataacgcgcaaaacgtagctaacaggaacctcttgtgaagtcttttcatatctgactctgattattgaaattcaagggtaaaggttgcgctagccctcaccagtcccggattgacggacttctgagtactcttcagacgagcggagtaaggcaaaatattgttctgttctggtaccagtgggatccactgcatcccggcatgaagatcattcagtttcaccggacgcatatttgcgtccaatatttctatacccaaaccggaggccgtattgcttccttcatccagtttcaacaaagtattattttctgcatcctcaataccgttaaatgcaacccgaacccccgttgtccctttgctgcattcacttaacgtaatctgaaaagggacggctggacttgtgctaccggtcgttggaaattgtctggcactgtttttttggagatctacggtaaaattaaggctatcgctactgactgtgcagccataatcgaggacgcgcccgctaattttaataacgctatctgcggataaagcagaataggtggttaaccccagacataaaccgaggaaaataatgttattgtatttcataatctattgttccttagcgacagattgctgtctgctggttcagtaaggtaccaggagaaacttcaggaagcttgtactcgacaatacagttactgtttttatctttgccccaactaacctgtaattgcccactctgtggaagtccagtcagataaacctgaccattttccgcgacaatgctgccatttttattctctccgtgtgtgacaattgcaccgaatggaacgctcttattaccgtacttcaacgtcattaatactttcccgccgatttgtgcattaaatgttgctctggcaatagcaccgtgagttgggatgacagtgaccacggtttcatccagttcaacattatctgcaagggaattcgcgttaagagcaacacggttttctctatattctgtcgcaaatggtaatatggcatagccacgccagtcggtatgaattccggtctggttctctattttgacattatcagcaccaggagccttaaccagaaccattgtgtcgcccagcggctgtccaaaggtgatgccatcagcatgagcaataatcccaccactcattccgtaataaatctggctgctgtcaccactccgactgtaaccgacattagtattaccataagctccacgataattaagagaactgtaaccactagtgccagagcttgtattacctccgtgggtgttaccgacctgaacgctataattcaggttattatccggcagcagagtgccataaaccccgcttagattggtcatgccgcctttcaaatcgttactcatactgtaactggcgttactattacgaaatgcgctctgactgtctgtacgcatccaatgactgaagggaacattaagcgtaaaagcgagtaaatgatcccgatcgttttgccatatattattggaatagctgtaattcaggctagtcgtaatatcaccaaacggcacatttaatccaaaacttatttgctggtcgctgcgactcgtgttccagtaactttggcgactggcactgaaaaatgtcgtaccgtaatttccaagctgctgagagatgcttatttgttcctgaccacgcttactgtagaacagattaaaataatcaataaattgtgtctgctcattggtgtctccggtaggaggcttgacggtgtaaccactcattcgactgtaggcactgtcggataagttataaaaaccttgcgtagaatagcgatatcctgcgacctggatattggttccacaacaagtttattgctgcacttgttgaagagagtatttgcaaaaacattttatgtcgctaaataacatgacgatttcattatgcatgttatttataaaccgtgactaaacagaatattattgcgaacaagggaagtgtcaggaaaggtcaagagctaccaatggttaatatggctataaatcattagctatggttaatgtttgcttgctgaaactaacaccgaattgctctaaacagataagtgcagggtttattaaagctgtccgacagactttcttaacctggtaatatctctcttgggtgactctccaaacatccgcgaatattcccgacactaatgggatagctttcgtaaccgacagcataggctgctgtggtgacatcgtaatgttcattcagcatctgtcgcctgacttcattgagacgtagccatttctgataccggagtggactcattcccgcttgatccgtccttaaataagtaacagcaccctctggtgttttcgtatgcagtgtctatgcgacagacactgcgctcttagcatggggcagggaataaccaggctatttctccatgcacaggccaattatgaaagaggagaggcttaagttcttgaaccctgaacgaataacgactaccagaaaagcacttcgcatcactcagacatgatttaacataatatacattatgcgcaccaatataaaccaaggaagaatccagtcgttggcggtcatgattgtcatgctcattaacaatgaccaaaccccatatctcacttactaccgtattctcggcttaaccgtccatgcaacctcaacacattgctttcaactgccgtcaccacgttctccggaaaatctgtcggtaaactagtcttcacgttatccagtgctgctggaatcattctggcaaagtcactcaggatttcatgcatctgcacttccgggaatctcagcacctttgctgtcgccaaaaaatgtcgcggataaattttatcgattgccgtttttttgcctttggatgcgttaagccccattgccagtttgagatcgctgatgtgtattcccgtaccgccaaggaccggaaatgcactaatgatgtcgtaaaatggcgtgagtcgataactgccgccagcctgaataaatacggagaagttttttgcatgaccgtccgttgcgccaatcaaccactggaagacctggaatttcataaaatcatagcgatctttcagcgcctcgctggaccccatcaaaaaagccatgatccgcgcgatgcctgggcctccatcactttcatatttcacgctactaggtaaaccgaatgtctgacacatatcctcctgtggcaagcgaagtaaaaccgttcgctcagcattccaacgcctgtcaaagcgttcgaccgctaacgcgcgcacatttcccgctttaatgatttctgcgtccggaacattcaacccaagttctttcgccagcagcagacagtaatactcattatcaacgctttggctgagatcgagcgtcgcattgggctgcctgatttcgccaatcggtaatttaatgatgtgcgtcgtcggcgttattcctttcggaatgcaccagtcattgcctattctgagcagtgctgtcttctcctgtgcgccagcaacgctgatgcgaaagtcattttcttctctaatcatgcctagcgggatatctgctttataagccgttaatacttcttcaagtctggcttcagtaagcttttcccatgccattatcggatgcgttacggtttcgtcttcgggtattaacgtcacggcaccaacgctgtctcgccctatttcactcaataaatcaaacggttgtctggatttggcatgataacgtttaacgatccggtcacgtacaatcgggctatcgggtaacaggttatcgaagaagttaaatacggcatcagaggtgatattccccctctgcaatggcaggctaagactcaacggtctggcataacggcttgctaaccactccggtgcatacttaaaggtgtgcgcgccgttggctaacttcgttaactcgcctacccgctggttgttcatccaagtgacaagtttaggcattaccactccagattttgctgttctgtactttctgggctggcatttttcgcgtcgcatagcgtcatactgagttcaaggctctgtaaaatcttaaaaaatgtcgtgagcgtggtattgtcagggttgttttcgaaattggaaatcgtcgcctgcttaataccaatttttttcgccagctcgctctgcgtccagccattttgctggcgaaccagtttcattgcattcgccaattgcgttgggctatagatcttctgaaagctcatcatgtcatacgtccacagcaagtttatccgcttaaggggatattataagttttatcctttagtgaggataagtcaatctggaaacacatcttatccgctctacgggataaacgctgcgatatccgcgatcgcggataaaaaggaggatttaaataaggcgttgatgcgccgtttgaagtcggcaatattaagccgcatgccatctcgacatgcggcttatacggtttaccagctatatttcactcccagcatgccctgagtatcgctatagcctttatcacctagttgcacaccgacattcccccacaggctaaggttgttatttactttcgcctcaaccccggtacgtacttcaccgagattacgcgcaccttcacggcctacggtttgaccattcatcttcacggcgtagactttgctattgttgatccagttcgcttcaatgtaaggctggaactcacgctgtttaccatcgtcacgctggtgatggctgttcaggtaggttttcaccccaagtcgcgtttgcacatttccgtcgccttccgtttcaatgcgcgttccgtctttccgggtatggtcggaatctttcacacccatccaggtgatttgcgcctgtggctggacgtaccaggtattcagcgtcccttcgctgccgctaaatgttcccgcttcaaaggtatacccaccctcaacagaggccgtcacaccgcgagaatcatagtcgtcagcagaacggttatcggaactgacgctgttatcaaaccagttatacagcgcccagctgtcaacataagcgccggtcttattcgcatcgttctgataccaggtcgcgtacagcccagcgctgtaaccgctgatgcgcccatcgcttttataacccacacgattactctgagtattactgtgctgattggcgtagcctgccatcacgccaagatgccagcgatcctgcgcgttgctactccactgcgccaaatcgccgcctagctgcaatacatagcggttagcctgagtatttagctgaccgtcaccggccctactacgttcgtgccctccgacatgacgcatccacatactgcttgcgctcccctgagaatgcagactatctgtatactgcggctcacccagacggtcgtgtaaacgatggctaaacaggctgttggctgcggcaatgttgctgatatagcttccggcctccgggcgataaacacttgggccttccggatccacaacagggggattattgatgggatcgggtgtatccgctggcgttacgccgtcccatttactggtcagataccagtttttctcgtcattccccttccctttagccagcgtgtagacgtaagccccagcttcgacagttccggtggtcagcgcgaagttacctgcagaattaccgccaacctcaatgagttcaataccgttgaccgtttgtgcaccgacgccgccaatgttatcaacccgaacgcgagtgttcccttgggtatcgcctttcacgttcatcttatcggtggggctattatcgccgcccagcgtcgcgttgaacgtcatcaggccattgtttccggtatagttgccgttaacggtcagtacattccccggtttccccccttcgctattcatttgaaccgtgccgccattctccaggttgccgccgatagtggttttagcgacacgcagtgccccccccaggcataacgttcatatcacctgcagtggtgacatttccgctcatcacaccgctgttatggatattaatgtgttgacttgccatattaatggcagagtcggaaccgaaagcaatttccccccccacgatatccgtcgtaccctgatatgccgcggaatcgttgttaagagtcaggatcccggtacccagttttgtcacatcaccgctaccgctgatactgtgcgtcatcgcccagctacgctcagtggagatggtgagcaggccattattgataacggaagcatcacccaggtttttctgctcgttgacgctgagcgcgctgcctgtatcaatgttgaattgccccacaaagcggctattatcgccatccaactctacatctgtcctggcggttgcgctcacgatacccttcccgcttatgctattacgcagttcgccagtcacgttttttagcgttaacagaccgtcattggcaatatttcctctgcctaacccctgagtattatcgaggctgacttccgcatttgggctaatgctggttaacgcattgtagcgtgcattaagcccctcgatagccagcgttccccctgtaacattcaggtttccgccacctgtcagttcaccctgactgatcccacctttatttaccgtcagcgccccctctttgaacaaaacagtgctacccatctgcccggtgaatgtctctaccgtctgcgtgcttccattaagatcgacgatggccgcgttgctgatgttcagttcccgggtgttgccaagtgcaccatccgcatcggtacgtaatgtccccatctgaacgtaggttgccccctgatagtcgttctgaccgttggaaaggctaacctgtcgcaccgtattgattgccagatccccttcaccaccgatttttgcgctcatatcggccgttgcgccataggctccgccatgttcggctaacgtcagcttttgcccaccatggatgttcagcgctttcagcccatagttaacgtacaaaccattacctggtgcggtcgtgaggcggaatccataatcaccctcggcgaccaccgttccgttttgcgcaatgtgtaacgttttgtccgcttccacctcgtcgccctgtaaatcacgtaacgttaaactgccaccgctcccaataaccgtttgcgccttcaccagttgaacgccgacatggctatcgtcgtgttccagcaaattgagcgtcgtcagagggttattcgccatgggatcattccacggtttaggcacgtcgataagcacgtcgcccgtcccgtttacctgatagttacggcctttccaggtgtagtcacccgcgccgacaaccagcgtatcgacgctgatatatccctccgcgagcgtcgcagcaggaatatccgtatcgaaaatgatggtacctccattcatggccagtccaccaatggattgctctccaacttttacgcttgtggtattttcactgtcagactgcaacatcgcgtgagtaagcgcagcggtgttgtcgcgttccagagtgaaggtactgtctttcagttgggcaacaccggcgaattcagtccctgttgcatgggtaaagccaaacatcttgtcggaggaactcagctgcactcgcatcaagccatcgcctttgagcgcattggtcagcgtgtaatctcctgcactgttcgtacttgcgagaatgtcgagcgtaccggggtttgcaatggttacttcactgctccccatgcccgttaccccatctgccgtatgagacgcaatggtcaggaggccgtcattgaccagcgttttaccgctataagtattccctgcattgaacaccgtatggcctgcatcatggatcacttttccgtctttatcgtcacctgtaatcagcatatcgacctggtagccggcatcactgttattggtatgattaaagacaaaaacgccttcgccaagaccaaactccactttcgtcgcattggtgataaatccggcatctgccgccgcctcaccgtgagcagcaccaatgtttagcgttcctacagcaggctcaaaaacacctaagtaaacttctccaccttcgacattcagcgtaccgttattcgtcagggttaacgtacccgtaccagatgtccctacgtacatattgaatgtttcaagaagagagttctgcccatccaccctcacgtcgcccttacttttgtcattgagagctatctgtgtatcacgcgctttaactatacctccggtggtaatattcagttcacccgtgcctaatacaccgacctgtagcaattgtgcgttagtagaacttgtctttaaattccagagactgtccgtactaatattaactatccccttaccggaggcatttcctccgataaatccatagcccgtactattaagggtggcaccattactgacatttacgataccgctaccaaaattaccgacattgatacccacagtatcgaagctacttgtcgcatccatcaggttcagtgtgccgataccgcttgctttatcgcccaaaaaagtaatattttggcttacgaacttaccgccatcgctaatattgaggtttccgacgcccgcaacaccaatggtggtatagacattcttattgacctcccacattccccccgtggtgatgctgacattcccgacgccggtttctccataaccgagactacttcctccgttgctgacaacaagcccctgattactgatattcatttcgccgtggccgtcataaccaagattagttccgagattagtgataacggagttcttatccttaacagtaatgttgcctgtgcctgtttctttcatccccgcagtgataattccgctatctactttgccttcactgctgacattaagttcaccgtcgccagcatcaccgatatagatatagcggaaagcttcgcccgttccgaggaaattccaatgccctttatcggtcacgttgacgacaccgtgggaaccgtcctgaacgcccaccaaactatattctttgttattaatcagtccattattggaaatattgactgtgccattaccgaaatatccattatagagtctgcgtaccgtgatgacagagtcttgatcctgcacattcagggttccgataccggtggcattgccaccgataatcgtattttcagccgtaaccaaccccccctcgcgaatagtcgcctccccagttccttgattaccaatttgaaattcaatactggaatcattattttttattagccactcgccacccttttcaacgacaacctggccattactgcccgcctgatagcctaaaatggcgacgatactactcgtgacgtaacccttatccgtaatatttaaactacctgtgccatagctacctatttcgaataattcggtcgtcagaacagagtcctctccctcaacattgaccgtcccgacgcctcctgtgctagaacctaatcttaaatagcctccatcgacgtgacccttctgtttaatattcagcgtccccgttccggattgacccacatttaaaggccttgcattatttccgctatcatacaatcgccaggtgccacccaaaacattaacggtgccctcactgtcctcattagcgccaatgacgctggtagtaatagtggttaaggaggcattaccgccagccaaaatattaagcactccagtgccataccagccaaccaggtaggcatcataagcaacatcagtatcaatattggtaatctgatcattatcaacttccagacttgcaccagacgcactaccgcttagtgccagcaaaacacccagcgtcaatctactgaatttcgttgtcagtccagaggatttacgcaaattaaccgtgcttgttttacctgccctgcgagttaattcgctgcaggcctgaaatacctgtagagtgcaattccatatcacgcgatagattctattcatataaacgctccatatacaaacaatacagccacgaaagagatgagtcgtcagacattaaaaatgaaacttattaaattgtcagaggtctgtattgagtgttagttggaggtgggaaggtgtcaatttggctaatttgctaatgctttcgaattgatagattaaaaattgcatagttcttattttatttaaatatgaactatgagttattgttgcttaataagaaaactgtttctttcaataggaaaattatcatcatcatatttaacaaagaatagcactaattgctaaaaatcgaagtttattaaaccccttttgcatccattagtgtctttaggaatattcgctataaaataagggttgtgcttaatgctttaagaaaaatagcaattttcccttgaatatcgtactggtgatggaacgatgaatctgcaagctggcttttaacaagccagctctaaaagaagggaaataagaataactatactcaaaaactaacagccacggtcatcatgatgtggctgtcaatgaaattataacccaggcgctttccataagctcgtcgtcagtccatgatcaaccagccccagctgatcctgataaactgcctgccacttatcgcgactatcctgataaagttcatgcttttccgggtctggtgtgtgcgtccgttcccagcgaaccaggcgttctccggtttctgccatactactaaaaattccggcaccgacgccagctgcaatggcacatcctaatgcagtggcttctttgaccaccggaatattgacgggtaatccgctgacatcagcgagaatttgactccataatttccctttactacctccgcctgcaaagactaagctactaggatgaatattgctgaaatcagcaatttgctgcaagttacacgcacttacaatcgccgcattttcttccagcgcacggaacaatgtcgctttgttacatttatccgggtcaatggacaagttaataaaggaaggcgcagcgtgataccaggttttaaagcgcattctgtcggagaagatcggcattacgccccagctcccaggcggcacccgactggccatctcttccagcagcgtataggtgtcgatgcctaaacgttcggcaatcagtttttcttcggcacagaaagcatcgcggaaccagcgcatggtgagtccggtaaaaaagcttatagattcagcttgtaccatgccaggaataacatgaggattaacgcgcacgttcatttctgggtctgtcaccggcgcggctaaatttacaacttgctgccagaatgtgccgccaagaaccgcggtttgtgccggacgcacaacgcctaacccaaggcaaccaagctgcacgtcgcctcctccaacgaccaccggagtgcccgccttcagaccgcagagttccgccgcttgactacttaccacgcccagcaatgtgccggtttctttgacaggagaaagaatatcggcacgtaggccagccatatccagcaatgcaggtttccagtcacgggtggttagatcaagaagtcccgtggtgccagcgttagagggatccaccgccagttcgccgctgagcatataggccagccagtcgctgatcatggtgatggtacttgcctgacggtaaatatcggaacgatggtgcgccagccaaagtaatctggggatggcacttaaagccagtgtttgtccggtcgcgcgataaacttcgttttcaaaggtattgttgtgcagttctttaagttcgctaacttcgcgtgccgctctggcatccacattggcgcaggcccagatcggggctccttcattattatataaaacaatgccttcacgcatgctacatgcgctaacggcagcgatatactccggggctatgccggcgttgtgcagcgcctggcgcatacactcacacgccagttgccagtttttgttgagatcaaattccatagaaccaggaacgtccggtactgccagatgccgccactccgcctgtcccactgctatttgattgccttccaggtcgaatatcacagcccgaatacttccggtgcctgcatccagcgccatcaggtagtacttactttcactaagggtaaagagtcgagccattagattatcctcggcttatgcgttctgtctgttcctctatacgttctccatcattcccggtaataaggtcatgcaaatttaactacgtaaaatcgccgctgctgtgtcctgatcggtaaccagtgcgttgatataaccgcctttcattgcagcggcaattgcttcggctttattttctccccctgccacgccaacccggacgggtatggtcttcagcgcgcttaaaggtaagccaatcagttcgttatgtattttgatattcgtgacaacgtcaccttttgcatcaaaaaagtagcctaaaatgtcgccaaccgccccttttcggccaatcattaactgttcgccctggctgatataaccggagcgaatgattgtcgcatcgtcctgttgactcacagcaccaatgccgacaatcgccacatccgctgcttgcgcggctaacagaacatctttgacgcaattttcattttttagcgtacgggcaatgtcagcggaggatgcccgcaacggagccggaataatattcacactgcacgccgcgttaagctgcccgattcccgtcatataagaaccgacgccaccggagagcgtgaccaggcgaatttgctgactgctaataaaaccacttaagcgttgcagcgtattcatggttgcctcgccaaaaccaatcgccagcatctgttgtggttgaagtaaactcatcaacatatgcgccgcgcctatccccagtcgcccaccgacatcagcatccgcaagcccagggatcacccggacatgttgcaggctaaactgacgacgtaattgagtttcatattccagacagccttcaaagcgagaattaatctgtacgcgaataatgccggactgatgccctttctccagcaatcggctcactttcaaacgtgtcaggccgagacgatcgctgatctcgctctgggtcagcccgtcgtgatagtaaaaccacgcgatccgcgcgacctgttcttcttcacacattccctgttcactaattgcgctatcgttgattgtcataattcattcttcactttgaacatatttaaatctttaatgcaattgttcagttcttgctcatttatatctgtgatggcaaccacagtttgactctacgagcatgaacaaacgcaaccgtgaaaatcaaaatagcataaattgtgatctattcgtcggaaatatgtgcaatgtccacctaaggttatgaacaaattaaaagcagaaatacatttgttcaaaactcacctgcaaaactgaacgggggaaatatgcaaacgagtgatacccgcgcgttaccgctactttgcgcccgcagcgtttataaacagtatagtggggtcaatgtcctgaaaggcatcgattttacgttgcatcagggggaggtccacgccctgctcggcggcaatggtgccggtaaaagcacgttaatgaagattattgccggtattacccctgctgatagcggtacgctggagattgagggcaacaactacgtcagattaacgccagttcatgctcatcagctgggtatttatctcgttccccaggaaccgctgcttttcccaagcctgagcataaaagaaaacatcctgtttgggctggcaaaaaaacagctctccatgcagaaaatgaagaacttgctggcggcgctgggctgccagtttgatctgcatagtctggcaggaagcctggatgtcgccgatcgccaaatggtggaaatcctccgcgggctgatgcgcgacagccggattctgatcctcgatgaacctaccgccagccttacccctgcggaaaccgaacgcttgtttagtcgcttgcaagagctgcttgctactggcgtgggtattgtttttatcagccataagctgccggaaattcgccagattgccgatcgaattagcgtgatgcgcgacggaaccatcgccttaagcggcaaaaccagcgaactgtctaccgacgacattattcaggccatcaccccagcggtacgggaaaaaagcctctctgccagccaaaaattatggctggagttacctggtaaccgcccacaacatgccgccggaacgccggtgctgacactggaaaatctgaccggcgaaggtttcaggaatgtcagcctgacgctcaatgccggagaaattctgggcctggctgggctggtgggggccggacgcacagaactggccgagacgctctatggtctgcgtactttgcgtggcggacgcattatgctgaatggtaaagagatcaataaattatccactggagaacgtttactgcgcggtctggtttatctgccggaagatcgccagagttccggactgaatctcgatgctagcctggcctggaacgtctgcgcccttactcataaccttcgtggattctgggcgaaaaccgcgaaagataatgccaccctggaacgttatcgtcgggcgctgaatattaaattcaaccaaccggaacaagctgcacggacattatccggtggcaaccagcaaaaaatcctcattgccaaatgcttggaagctagcccgcaagtattgattgtcgatgagccgacgcgcggcgtggatgtcagcgcccgtaatgatatctaccagctgttgcgcagcatcgccgcacaaaatgtggctgtgctgcttatctcctccgacctggaagagatcgaactgatggcagatcgtgtgtatgtgatgcatcagggcgaaattacccactctgcactgaccgagcgcgatattaatgtcgagactattatgcgcgttgccttcggcgatagtcagcgtcaggaggcgagttgctgagctaaagtcagcgtcaggaggcgtcatgctgaagtttattcagaacaaccgtgaaatcacggcactgctggcggtggtgctgctgtttgtattacccggttttctcgaccgccagtatttaagtgtgcaaacgctgaccatggtttatagcagcgcgcaaatcctgatcctgctggcaatgggcgcgacgctggtaatgcttacgcgcaatattgatgttagtgtgggtagcattaccggaatgtgcgcggtgctgttggggatgttactgaacgcaggatatagtctacctgttgcttgtgtcgcgactttactgcttggtttgctcgcgggatttttcaacggtgtcctggtcgcgtggctaaagatccctgccattgttgccacccttggcacgttagggttgtacagaggcatcatgttgctgtggactggcggcaaatggattgaagggttacccgccgaactgaaacagctctccgccccgctgctgcttggcgttagtgcaattggttggttgacgataattctggtggcatttatggcctggctgctggcaaagacggcgtttggacgcagtttttatgccacgggcgataatttacagggcgctcgtcaactgggcgttcgtactgaagccattcgcattgtggcatttagcttgaacggctgcatggcggcactggcgggaattgtgtttgctagccagattggttttatccccaaccagaccggtaccgggctggagatgaaagcaattgcagcctgcgtgctgggcggcattagtttgctcggtggttccggtgcgatcattggtgcggtactcggcgcatggttcctgacgcagatcgatagcgtactggtgctgttgcgcattccggcatggtggaatgattttatcgcgggtctggttctgctggcggtgctggtgtttgatggacgcctgcgttgtgcgctggaacgtaatctacggcggcaaaaatatgcccgctttatgacgccaccgccatccgttaaacccgctagcagtggtaaaaaacgggaggccgcataatgcgtattcgctacggttgggaactggctcttgccgcactgctcgttattgagattgtcgcatttggtgcaattaacccgcgaatgttagatctcaatatgttgctgttcagcaccagtgactttatctgcattggcattgtcgccctaccgctaacgatggtgattgtcagtggcgggatcgatattagctttggtagcaccatcggcctctgcgccattgcattgggcgtactgtttcaaagtggtgtgccgatgccgctggcgatactcctgaccttactgctcggcgcattgtgcgggctgatcaacgccggattaattatctataccaaagttaacccgctggtgattacgcttggcacgctgtatctgtttgccggaagcgctctgctgctttccggtatggccggagcgacggggtacgaaggtattggtggattcccgatggcgtttacagatttcgctaacctggatgtgctgggactccccgttccgctgattatcttcctgatatgtctcctcgttttctggctctggctgcataaaacccatgccggacgtaatgtgtttttgattgggcaaagcccgcgcgtggcgctttatagcgcgattccagttaaccgtaccttatgtgcgctctatgccatgacggggctggcgtctgcggtcgccgctgtgctgctggtaagctattttggtagtgcacgttccgatctcggtgcgagctttctgatgcccgccatcaccgccgtggtgcttggcggggccaatatttatggtggttccggttccattatcggcaccgccattgcggttttattagtgggatatttgcaacaaggtttgcaaatggcaggagtgccaaatcaggtgtccagcgccctttccggtgcgctacttatcgtcgttgtcgtaggtcgttccgttagcctgcatcgccagcaaattaaagagtggctggcgcgtcgggccaataacccattgccataaaggatatcttcatgacacttcatcgctttaagaaaatcgccttacttagcgctcttggcattgccgcaatctctatgaatgtgcaggccgcagagcgtattgcatttattcccaaactggttggcgtgggattttttaccagcggtggcaacggcgcacaacaagcgggtaaagagctgggcgttgatgtgacctacgacgggccgacagaacccagtgtttctggtcaggtacagttgattaataacttcgtcaatcaaggttataacgccattatcgtttctgcggttagccctgatggcttgtgtccggcactgaaacgcgccatgcaacgtggtgtgagagtgctgacctgggactctgatactaaaccggagtgccgctcttactacattaatcagggaacgcccgcccagttaggaggtatgttggtggatatggcggcgcgtcaggtgaataaagacaaagccaaagtcgcgtttttctacagtagccccaccgttacggaccaaaaccagtgggtgaaagaagcgaaagcgaaaatcgccaaagagcatccaggctgggaaattgtcactacgcagtttggctataacgatgccactaaaagcttacaaaccgcagaaggaatattaaaagcgtatagcgatctcgacgccattatcgcccccgatgccaacgccctgcccgctgccgcacaagccgcagaaaacttgaaaaatgacaaagtagcgattgtcggattcagtacgccaaatgtgatgcgcccgtatgtagagcgcggcacggtgaaagaatttggcctgtgggatgtggttcagcaaggcaaaattagtgtgtatgtcgcggatgcattattgaaaaaaggaagtatgaaaacgggcgacaagctggatatcaagggcgtaggtcaggttgaagtcagcccaaacagcgttcagggctatgactacgaagcggatggtaatggcatcgtactgttaccggagcgcgtgatattcaacaaagagaatatcggcaaatacgatttctgatgtgcattacttaaccggagtaagttatggcagatttagacgatattaaagatggtaaagattttcgtaccgatcaaccgcaaaaaaatatcccttttaccctgaaaggttgcggtgcgctggattggggaatgcagagtcgcttaagccggatatttaatccgaaaacgggtaaaaccgtgatgctggcttttgaccatggttattttcagggaccgactaccggacttgaacgcattgatataaatatcgccccgctgtttgaacatgccgatgtattaatgtgtacgcgcggcattttgcgcagcgtagttccccctgcgaccaataggccggtggtactgcgggcgagtggtgcgaactctattctggcggaattaagtaatgaagccgtggcgttaagcatggatgacgccgtgcgcctgaacagttgcgcggtggcggcgcaggtttatatcggcagcgaatatgaacatcagagcatcaaaaatattattcagctggttgatgccggaatgaaagtgggaatgccgaccatggccgtgactggcgtgggcaaagatatggtgcgcgatcagcgttatttcagcctcgcgactcgaatcgccgctgaaatgggggcgcaaattatcaaaacctattatgtcgaaaaaggttttgaacggattgttgccggatgtccggtacccattgttattgctggcggtaaaaaattaccggagcgcgaggcgctggaaatgtgctggcaggctatcgatcagggcgcttctggtgtggatatggggcgtaatattttccagtctgaccatccggtggcgatgatgaaagccgtacaggcggtggttcaccataacgaaacggctgatcgggcatatgaactctatctgagtgaaaaacagtaactgcggatctaaggagaagaattatgcacgtcacactggttgaaattaacgttcatgaagacaaggttgacgagtttatcgaagtttttcgccagaaccacctgggctctgtacaggaagaaggcaatttgcgcttcgatgtcttacaggacccggaagtgaatagccgcttttatatctacgaagcctataaagatgaagacgcagtggcgttccataaaaccacgccccactacaaaacctgtgtcgcgaaactggaatctttaatgaccgggccgcgtaaaaaacgtctgttcaatggtttgatgccgtgaggcgaatttatcaattttatctacaattggggtaacgcgctgacgggagtaaaaaaatgtctgactggaacccctctttatatctacacttttccgctgaacgaagccgtccggcggtggagctgcttgccagagtgccgctggaaaatgtcgaatatgttgccgatcttggctgtggcccaggtaacagcaccgcccttctacaacaacgttggcctgcggccaggataacaggcatcgacagctctccggcgatgattgctgaagcgcgcagtgctttgccagactgccagttcgtggaagcagacatccgcaactggcaaccggtacaggcactcgatctgatttttgctaatgccagtctgcaatggctgcccgaccactacgaattgtttcctcatctggtttctttacttaatccgcagggcgtgctggcagtacagatgccagataactggctggagccgacccatgtgctcatgcgcgaagttgcctgggaacaaaactacccggatcgcgggcgtgagccgttggctggcgttcatgcttactacgatattttgagcgaagccggatgtgaggtcgatatctggcgaaccacctactatcaccagatgccgagtcaccaggcgattatcgattgggtgactgccactggattacgtccgtggttacaggatctgaccgagagcgaacagcagctttttcttaagcgctaccatcagatgctggaagagcagtatccactgcaagagaacggacagatactgctggcatttccgcgtctgtttattgttgcccggcgtatggagtaaatatcacgtcagctggtaatgacgatcgggaagaatttttgctggaatttcggcttcatcgttcatctgtaacaggtcaatttcaatagcgttgcagatggcatccagtggtaaatcattgttttcagtaccgaacggatcttccagttcttccgccagacaatccaggctaataaaagtgtaggaaatcagcacagagataaaaggcgtcatgtaatgcaggtccacgaccagcgcgaacggcagcatgatacaaaacagataaacggtacgatgcaaaatcagggtgtaggcaaagggaattggcgtataggcaatgcgctcgcatcctgccaggaccgcactaatatcattaagccgatcgttgaggctaataaacaggatatcactaagctgtccattgcggcgctgaaccgccaaccattctcccattattaacaagatacggttagctggagagttgctagccagtacacgctgaagatcttcagtcttgagataatgagccagcacttccgcctgtggctgtttgcgtaatgtcatgcgtaaacagtgggcgaaagcgatttgcagccgggcaaactcccttacacttgcgctatccggcaatgtcgtttttacctcgcgcagtaagctccgactggcaatcatcaactgcccccaaagttttcgcgcttcaacgtaacgggcgtacccggcattattacgaaaaccaagaaaaatggcgatggcgacaccgagaatgctgaacggtgcgagggtgaatttgatgcccagatgcgtgtaccagggcagcatgaaaataacagcgatagaaaagagaaaattgagtagtaagcggctggatatcttggataatacactgccgtgccagacaaaaatacggcgcagccagtgttgttgtggacgaacaatcatggttatcttcaggcgtggaaaagtcgccctattaaacgtgattacgatcacattctcaagacgctacttacaaattacctacaagcttacaacattagcaggcgctgcatgtggcacctgttaatgataaaggcatataggatgttgtaactaatatggtgaaataagaaacccggtcgaaaccgggttcagaagtaacggtgttattagcacaacggacgtacagcttcgcgcatccctttttcgagaatcgcatccaggtcattagcaacctgctcgaccagaccaggcacttgcgtcaggtcctgctcccagtggtctttttctgccaaaacaatcgctaccagttcctgggtgccgataacacggtcacgatgctggctccagagttgctgataacgttccagccagtgtgcatcgtcctgtaccggatatgtttcgccgttacgctcaccacgatagaacgcaatcaatgccgctaatgcgaaagtaaggcgcgccggaagtgtgccgtttgccttctgccctgccagcagctgtggcaggatgcgggtgcggaacttggtcataccgttgagcgcgatagacagcagctgatgcttaatgtacgggttacggaaacgcccggtgactgcactggcgaaagattccagttcatcacgaggcaaatccagtaccggaataatttcttcgtagatagctttttcaacgaatgcgcaaatttcagcatcgttcatcgcttcacctacggtatccagccctgcctggaacgccaccggcaccagcgcggtgtgcgcaccgttgaggattgccactttgcgttctttgtacggtttaatatcgtcaacaatcagcacgttgagcggatatttgtccagacgcagttcagtcgctaaggatttcggtccctgaatcacaaacaggtaaaagtgttcagcggtgtcgagaaaaccatcgtgataacccagttcttcttccagtttagccacttcatcgcgcggataaccggtaacgatacggtccaccagcgtagaacagaagctgttagcctgatccagccattgaataaatgcttctggcagtgcccactcttgcgcatagcgcagcaccagttcacgcaacgcgtcgccattgtagtcaatcaactcacacggaatgatgatccaacctttatccagcgcaccgttgaaatggctaaagcgttcgaacagcagacgggtcagttttgccggatagcttaccgctggcgcgtcatcgaatttatcgcccgcatggtagctgatacccgcttcggtggtgttagagaaaacaaagcgcatttccgggttgtgcgccagtttcaggaattcatcgtattcactgtagacgctgatttcacgattaacgctgcgaatcagacgcgcgtcgctgaccgcttcccccttctcattcaggccacggataatggtggtgtacagaccatcctgcgtgctcagactcggcgggaaactagtttcaatcggacgaacaacgaccacgccagaattcagatcggtgtgctcattcaggagatcgatttgccagtcaacaaaggcgcgcaggaagttaccttcaccaaactgaatgatacgttctggatactgtgcaccgggaaaatcgcgacgatttagtgttttcacaatgggttcccttctgattagtcatacaacctgtttgaattggtacgacaggttagcaaactttaatacgccgaacccctgttttgatcaactcctgatgattaatgagcagttttatgagaaaagtgtggcgcggatcatggtttaatcgaggaaaaacgccttttcctggatcataaagtggtagaacacattgcattcaaatcgcgcgtaatgaataaagatgtcagacaacttcctcaccgtaacgcatagtgctggtacggttgcgcccatctttcttgctgcgatacagacacgtatcggcttcgaccatcaatttattaaagtcatcggtcagcgttaggtagcttgcgcgaccactaccgacgccaatacttaccgtgagataaagcgttttttgttgccaggtgaatggttgcagttcaacgcctttacggattttttccgccattagcagaccatcgacaggattcacgctcggcactgcaacagcaaattcttcgccgcccattcgcgccaccagccccttatcaccgacaatcttctgaatatgccgggcaaacacgcttaacactttatcgccacattcatgtccatagttatcgttaatgcttttgaaatagtcgatatcaagcagcatgacagtcagatgttgtgtctgtttcaggcttggacttttcagcgcctcataaagaccggaccgactgtaaacctgagtcagaaaatcaaagtcggctcgcagcgcaacttgcttcattaggctattgatcgctgccacgctaaaagaaaccataattgggcatatcgccatcgtggcaataccgagacgtgcggagaacatttgcggaatggagaacgggctaccgacgctgatatcaatcacgctatttgccaccagtacgatttccaccgcaccggtgacaaaggtcaacagacatgttacctgcggcgtatagcgcactgcacaccagattaatgcaggcagcgggaacgccagactccccgctccgccaatgactacgctggcaataacgctcacaataagcgcgatggcgggcatcatctgttctgctttaaagcgcggcagcactccaggaatagccaacgtcagcatacaaggcacgatcaacacgcccgtactgaattgctcactgaaccagtccgcaagcaaaggccagaaatccagactatcaatactgaccgaaccaagatagcatgttcgctgacagcggcggcaaataaaggtaccctgggaatgctattttgtcgttttccgcaattctcatggctgattcatctgtacaaccagccagtgatagattaccgccacgatataacgttgttgttcttcgcttaagctaacaccctgcggaatgttatgccacttagccagacaaccgcgacagcaggtcgcggtggcgtgctgagcgataaacaccggatgcccgcgcatgggggtttgcttaccgtcattagccggtaatgccggagcaagacgtttagcgacaaaatccgccgcatgttgttcgatgactggcgcgcctttctccaggcaatactgacgctctttcatgcccagacgaaagcgagagcgaaatttactacgggataaacgcgcgaagagtggatcgagagactgcattaataaacgctacgccctaactgtttcgtcaattgttcaagaacggcaatacccgcaaggctgttacctgcatcatccagttccggactccagacagcgatggccatttcatgcggaacaatcgccacaataccgccaccaacgccagatttcgccggtagccccacccgccaggcaaactcccccgcgttctggtacataccactggtcgccatcagcgcgttaatttgccgcgcctgcattggcgtcaccactggttcatcaatatgaatagctttcccctgattagccagaaagacaaacgtccgggccagctctacacagctcattttcagagcgcagtaatgaaagtagttttgcagaacggttgtcacgtcatgatggaaattgccaaagctcttcatcagccaggcgatagccgcatttcgcgcggaatgttcaaattcggaacgcgctaccaccgtatcgtaggaaatatcagacacaccgcttaagccgcgcacgacttccagcatacgttgccgtggtgcgcttaatcgcccttgcaacatatcgcagaccaccagcgcaccggcattaatgaacggattacgcggtataccctgctccatttccagttgcactaaggaattgaacggacttccagacggatctttgccgacgcgttgccagatttcctcttcggagtaatgacgcatggcgacaacgagactcagcactttggaaatagactgaatggaaaaacgttcttgcgcgtctccggcctgaaaaagctgtccgtcaacggtacagatagcaatccccaatcgggaaccgtctactgtagccagcgccggaatataatccgcgactttaccctgaccaatgagcggccgcacttgccgcaagatgttttctaaaattgcattatccatggcgactgccactttctactcctggaccgcaggtctgaaaagacctgcgagtatatcagagctgaatatgtcgcgtcagatccggtctttccacaccgtctggatattacagaattcgtgtaagccgaaatgggaaagctcacgaccaaagccactctttttcacgccaccaaaggccactcgcgcgtcgctggcacaataaccattgataaacaccccaccgcattccagacgtgccgccatctgtctggcctgtgtttcgtcagtggtaaaaatggtcgcactaaggccgaactcactatcattagccagttccagtgcatgttctgcatctttcgcaatggtgattgccgcaacggggccaaacatttcttcccgaaacgcggtcatttctggggtaacattcgccagaaccgttggcggatagtagttacctgccccagccatcttttccccgcccagtaacaaacgcgcaccctgcgccagggttttctccacctgatgatgcagctcatcacgtaaatcaaaacgagccattggtccgagagcgttctcttcgtcacggggatcgcccattttcaaggctgccgcagctgccacaaaacgttcggtaaatgcgctagcaattccctcttcgataataaagcgttttgccgctgcacatacctgtccggtattctgataacgtccggctaccgccgctttcaccgccagttccagatcggcatcgttaagcacaataaacggatcgctaccgcccagttccagtacgcattttttcagtgccgctccagcctgtgcgccaatagccgctcccgcacgaacacttccggtcaccgtgacagcagcaatgcggctgtctttaatcatctgactgacaccgtcgttgtcggcattcagccagccatatacgccttgtgggatacccgcatctttaaacacctgggcaatgagctgtgcacagcccatcacattcggcgtatgtttaagtaagtagccgttacctgcaagaatgatgggaacagcgccacgcatcacctgccataacggaaaattccacggcataatcgccagaatcgtccccaacggtcgatactcaataaccgcctgctgattttccaccagcgtaggttccgccttcagcattgccggaccatgttctgcataccagtcacacaaattcgcgcttttcgccacttcagcgcgcgcctggttgattggtttgcccatttcgcgggtgatcatttgcgccatttcttcgctacgagcgcgcagagccttaccgatatcacgcagtttttcagcacgataatctatatttgtctcgcgccagtcgcgaaagcctgctgccgccagctgaagtgcgttttcgatatcgtcagcgccagcccacggcagcacagaaagttgttcacccgtggcaggatttatgctaattgcatgagttgccggagtaatggtcatcggggtatctcctttatgagtcatggtatgaagatacgcagatttactcttgctttaaaatgaataatattaagccacttattcacgaatcgagaatgctatggatctgacccaactggagatgttcaacgcggttgccgaagctggcagcataacccaggctgcagcaaaagtgcatcgcgtgccgagcaatctcactacccgtctgcgccagctggaaacagaactgggggttgatctgtttattcgcgagaatcagcgtttacgtctctctcctgccgggcataactttttacgctatagccaacaaattctcgcgttagtggatgaagcgcggagcgttgtcgctggcgatgagccgcaaggtttattttctcttggtagcctggaaagcaccgctgcagtgcgcattccagccacgctggcggaattcaaccgtcgttatcccaaaattcagtttagtctttccaccggcccttccggcactatgctggatggtgtactggagggaaaactgaatgcggcgtttattgatggacccattaaccatactgccatcgacgggataccggtataccgcgaggaactgatgatcgtcacgccacaaggatatgcgccagtaacccgtgccagtcaggttaatggcagtaacatttatgccttccgcgccaattgtagctatcgtcgccacttcgagagctggtttcatgctgacggtgccgctccgggaactatccatgagatggagtcttatcacggaatgttggcctgtgtgatcgcaggagcaggcattgcgcttattccgcgctctatgctggaaagtatgccggggcatcaccaggttgaagcgtggccgttagctgagcaatggcgttggttaacaacctggctggtctggcgtcgtggtgcgaaaacacgtccgctcgaggcatttattcaactgctggatgtgcctgacagcgcaagacagggatatcaatgagctatttttgatagttcttgcggttaatatgctctatatagtgatgttccgatgacttatgactatatggggcaaatatggttacgccagtaagcatcagcaattacatatctcttcctgatgattttcccgtacgtaatattgcaccgcaggtaaaagaagttttaaaggattttattgatgcacttagtacaataatatgtaatgaagagtggcgcacgtctttaaacatcaacagtgccacaaaaaagatatttaataaccttgacaacttaagttatattcagaggacttcttttcggggtaacgacacgctatacaatgaaaaggttcagtttaaactcacttatcccgccaggaatggaagacacaaagaaaatattgaatttcaggtagtaataaatttaagccctatttatttagataattttcgccatgatggagaaattaatattttttgcgctcccaacccaaagcctgtcactatggggcgcgtatttcagaccggcgtcgagcgtgtactctttctgtttctgaatgattttattgaacaatttccaatgatcaaccctggtgttcccatcaaaagagcgcatacaccacatattgaacccctgcctagcgatcaccataccgctgcagattacttacgccagtttgatttgcttgtcctgaattttatctctcgcggtaattttgtcatactcccccgattatggagtaactctgaggttcacagatggttcgtcaataaagatcctaacttgatcaccgccattctcgacataacggacagcgaattaaaagaggatttgttgcaaagcctgatggatagtttaggttctaacaaacatgtactacccgaagtctgcatctgctttttatcccttttagcagaacaagaatctcctcattttcagaacttgtttttatttttcgccaatatgttattgcactatcaccaatttatgaatcccaatgaaagtgatttgaatgacgtgttgatgccagcaagtttaagtgatgataaaattatcaaacatatggcgcgcaggaccctcaaactgtttgtaaaaaatgaaacaccgccaaaagttactcacgaagacctggtgaaaaacaggcctcgctcccctgtcagaccacctatacccgcaaccgccaaaacgccagacctccctgaacgtcattaaaccgtgatgttaccgactctctgacgcgtgaaagaatcagcgtcagagaaacggaaaacgcgatccagatcacaaatgcattgtattcacatcattaaccgttttaagatcatttcatcactttttcgcaactcacccgataatctgttatgacaacaaacactgtttcccgcaaagtggcgtggctacgggtcgttacgctggcagtcgccgccttcatcttcaacaccaccgaatttgtccctgttggcctgctctctgacattgcgcaaagttttcacatgcaaaccgctcaggtcggcatcatgttgaccatttacgcatgggtagtagcgctaatgagtttgccttttatgttaatgaccagtcaggttgaacggcgcaaattactgatctgcctgtttgtggtgtttattgccagccacgtactgagctttttgagctggagctttaccgttctggtgatcagtcgcattggtgtggcttttgcacatgcgattttctggagcattacggcgtctctggcgatccgtatggctccggccgggaagcgagcacaggcattgagtttaattgccaccggtacagcactggcgatggtcttaggtttacctctcgggcgcattgtgggccagtatttcggttggcgaatgaccttcttcgcgattggtattggggcgcttatcacccttttgtgcctgattaagttacttcccttactgcccagtgagcattccggtagtctgaaaagcctcccgctattgttccgccgcccggcattgatgagcatttatttgttaactgtggtggttgtcaccgcccattacacggcatacagctatatcgagccttttgtacaaaacattgcgggattcagcgccaactttgccacggcattactgttattactcggtggtgcgggcattattggcagcgtgattttcggtaaactgggtaatcagtatgcgtctgcgttggtgagtacggcgattgcgctgttgctggtgtgcctggcattgctgttacctgcggcgaacagtgaaatacacctcggggtgctgagtattttctgggggatcgcgatgatgatcatcgggcttggtatgcaggttaaagtgctggcgctggcaccagatgctaccgacgtcgcgatggcgctattctccggcatatttaatattggaatcggggcgggtgcgttggtaggtaatcaggtgagtttgcactggagtatgagcatgattggttatgtgggcgcggtgcctgcttttgccgcgttaatttggagtatcattatatttcgccgctggccagtgacactcgaagaacagacgcaataattgaaaggcccattcgggccttttttaatggtacgttttaatgatttccaggatgccgttaataataaactgcacacccatacataccagcaggaatcccatcagacgggagatcgcttcaatgccacccttgcccaccagccgcataattgcgccggagctgcgtaggcttccccacaaaataaccgccaccaggaaaaagatcagcggcggcgcaaccatcagtacccaatcagcgaaggtactactctgacgcactgtggacgcgctgctaataatcatcgctatggttcccggaccggcagtacttggcattgccagcggcacaaaggcaatattggcactgggttcatcttccagctcttcgctcttgcttttcgcctccggactatcaatcgctttctgttgcggaaagagcatccgaaaaccgataaacgcgacgattaagccgcctgcaattcgcagaccgggaatgctaatgccaaatgtatccatcaccagttgcccggcgtaatacgccaccatcatgatggcaaatacgtacacgctggccatcaagctctgacgattacgttcggcactgttcatgttgcctgccaggccaagaaataacgcgacagttgttaatgggttagctaacggcagcaacaccaccagccccaggccaattgctttaaacaaatctaacattggtggttgttatcctgtgtatctgggttatcagcgaaaagtataaggggtaaacaaggataaagtgtcactctttagctagccttgcatcgcattgaacaaaacttgaaccgatttagcaaaacgtggcatcggtcaattcattcatttgacttatacttgcctgggcaatattatcccctgcaactaattacttgccagggcaactaatgtgaaaagtaccagcgatctgttcaatgaaattattccattgggtcgcttaatccatatggttaatcagaagaaagatcgcctgcttaacgagtatctgtctccgctggatattaccgcggcacagtttaaggtgctctgctctatccgctgcgcggcgtgtattactccggttgaactgaaaaaggtattgagcgtcgacctgggagcactgacccgtatgctggatcgcctggtctgtaaaggctgggtggaaaggttgccgaacccgaatgacaagcgcggcgtactggtaaaacttaccaccggcggcgcggcaatatgtgaacaatgccatcaattagttggccaggacctgcaccaagaattaacaaaaaacctgacggcggacgaagtggcaacacttgagtatttgcttaagaaagtcctgccgtaaacaaaaaagaggtatgacgatgtccagacgcaatactgacgctattaccattcatagcattttggactggatcgaggacaacctggaaagcccactgagtctggagaaagtgagtgagcgtagcggttactccaaatggcacctgcaacggatgtttaaaaaagaaaccggtcatagtttaggccaatacatccgcagccgtaagatgacggaaatcgcgcaaaagctgaaggaaagtaacgagccgatactctatctggcagaacgatatggcttcgagagccaacaaactctgacccgaaccttcaaaaattactttgatgttccgccgcataaataccggatgaccaatatgcagggcgaaagccgctttttacatccattaaatcattacaacagctaattgaaaacgtgacaacgtcactgaggcaatcatgaaaccacttagttccgcaatagcagctgcgcttattctcttttccgcgcagggcgttgcggaacaaaccacgcagccagttgttacttcttgtgccaatgtcgtggttgttcccccaagccaggaacacccaccgtttgatttaaatcacatgggtactggcagtgataagagcgatgcgctcggcgtgccctattataatcaacacgctatgtaatttgttctggccccgacatctcggggcttattaacttcccacctttaccgctttacgccaccgcaagccaaatacattgatatacagcccggtcataatgagcaccgcacctaaaaattgcagacccgttaagcgttcatccaacaatagtgccgcacttgccagtcctactacgggcaccagtaagcttaacggtgcaacccgccaggtttcatagcgtcccagtaacgtcccccagatcccataaccaacaattgtcgccacaaacgccagatacatcagagacaagatggtggtcatatcgatagtaaccagactgtgaatcatggttgcggaaccatcgagaatcaggctggcaacaaagaagggaatgattgggattaaagcgctccagattaccaggctcatcaccgccggacgcgtactgtggctcatgatctttttattgaagatgttgccacacgcccaactaaatgctgccgccagggtcaacataaagccgagcatcgccacatgctgaccgttcagactatcttcgattaacaccagtacgccaaaaatcgctaaggcgatccccgccaattgtttgccatgcagtcgctccccgaaagtaaacgcgccaagcatgatagtaaaaaacgcctgtgcctgtaacaccaggctagccagtccagcaggcataccgaagttaatggcacaaaaaagaaaagcaaactgcgcaaaactgatggttaatccataccccagcagcaaattcagtggtactttcggtcgtgcgacaaaaaagatagccggaaaagcgaccagcataaagcgcaaaccggccagcatcagcggtggcatgttatgaagccccactttgatgaccacaaaatttagcccccatacgaccactaccagtagcgccaacaccccatcttttcggctcattctaccgcctctgaatttcatcttttgtaagcaatcaacttagctgaatttacttttctttaacagttgattcgttagtcgccggttacgacggcattaatgcgcaaataagtcgctatacttcggatttttgccatgctatttctttacatctctaaaacaaaacataacgaaacgcactgccggacagacaaatgaacttatccctacgacgctctaccagcgcccttcttgccagcagcttgttattaaccatcggacgcggcgctacgctgccatttatgaccatttacttgagtcgccagtacagcctgagtgtcgatctaatcggttatgcgatgacaattgcgctcactattggcgtcgtttttagcctcggttttggtatcctggcggataagttcgacaagaaacgctatatgttactggcaattaccgccttcgccagcggttttattgccattactttagtgaataacgtgacgctggttgtgctcttttttgccctcattaactgcgcctattctgtttttgctaccgtgctgaaagcctggtttgccgacaatcttagctccaccagcaaaacgaaaatcttcagtatcaactacaccatgctaaacattggctggaccatcggtccgccgctcggcacgctgttggtaatgcagagcatcaatctgcccttctggctggcagctatctgttccgcgtttcccatgcttttcattcaaatttgggtaaagcgcagcgagaaaatcatcgccacggaaacaggcagtgtctggagcccgaaagttttattacaagataaagcactgttgtggtttacctgctctggttttctggcttcttttgtaagcggcgcatttgctagttgcattagtcaatatgtgatggtgattgctgatggggattttgccgaaaaggtggtcgcggttgttcttccggtgaatgctgccatggtggttacgttgcaatattccgtgggccgccgacttaacccggctaacatccgcgcgctgatgacagcaggcaccctctgtttcgtcatcggtctggtcggttttattttttccggcaacagcctgctattgtggggtatgagtgctgcggtatttactgtcggtgaaatcatttatgcgccgggcgagtatatgttgattgaccatattgcgccgccagaaatgaaagccagctatttttccgcccagtctttaggctggcttggtgccgcgattaacccattagtgagtggcgtagtgctaaccagcctgccgccttccagcctgtttgtcatcttagcgttggtgatcattgctgcgtgggtgctgatgttaaaagggattcgagcaagaccgtgggggcagcccgcgctttgttgatttaagtcgaacacaataaagatttaattcagccttcgtttaggttacctctgctaatatctttctcattgagatgaaaattaaggcaagcgaggaaacacaccacaccataaacggaggcaaataatgctgggtaatatgaatgtttttatggccgtactgggaataattttattttctggttttctggccgcgtatttcagccacaaatgggatgactaatgaacggagataatccctcacctaaccggccccttgttacagttgtgtacaaggggcctgatttttatgacggcgaaaaaaaaccgccagtaaaccggcggtgaatgcttgcatggatagatttgtgttttgcttttacgctaacaggcattttcctgcactgataacgaatcgttgacacagtagcatcagttttctcaatgaatgttaaacggagcttaaactcggttaatcacattttgttcgtcaataaacatgcagcgatttcttccggtttgcttaccctcatacattgcccggtccgctcttccaatgaccacatccagaggctcttcaggaaatgcgcgactcacacctgctgtcacggtaatgttgatatgcccttcagaatgtgtgatggcatggttatcgactaactggcaaattctgacacctgcacgacatgcttcttcatcattagccgctttgacaataatgataaattcttcgcccccgtagcgataaaccgtttcgtaatcacgcgtccaactggctaagtaagttgccagggtgcgtaatactacatcgccgattaaatgcccgtaggtatcattaaccaatttaaatcggtcaatatccaacaacattaaataaagattcagaggctcagcgttgcgtaactgatgatcaaaggattcatcaagaacccgacgacccggcaatcccgtcaaaacatccatattgctacggatcgtcagcaaataaattttgtaatcggttaatgccgcagtaaaagaaagcaacccctcctgaaaggcgtcgaaatgcgcgtcctgccagtgattttcaacaatagccagcattaattcccgaccacagttatgcatatgttgatgggcagaatccattagccgaacgtaaggtaattcatcgttatcgagtggccccagatgatcaatccaccgaccaaactggcacagtccataagaatggttatccgttatttctggcttactggcatctctcgcgaccacgctgtgaaacatactcaccagccactggtagtgggcatcgatagccttattgagatttaacaagatggcatcaatttccgttgtcttcttgatcattgccactcctttttcacagttccttgtgcgcgctattctaacgagagaaaagcaaaattacgtcaatattttcatagaaatccgaagttatgagtcatctctgagataacattgtgatttaaaacaaaatcagcggataaaaaagtgtttaattctgtaaattacctctgcattatcgtaaataaaaggatgacaaatagcataacccaataccctaatggcccagtagttcaggccatcaggctaatttatttttatttctgcaaatgagtgacccgaacgacggccggcgcgcttttcttatccagactgccactaatgttgatcatctggtccggctgaacttctcgtccatcaaagacggccgcaggaataacgacattaatttcaccgctcttatcgcgaaaaacgtaacggtcctctcctttgtgagaaatcaaattaccgcgtagactaacgctagcgccatcgtgcatggtttttgcgaaatcaacggtcattttttttgcatcatcggttccgcgatagccatcttctattgcatgaggcggcggtggcgctgcatcctgttttaaaccgccctggtcatctgccaacgcataaggcatgacaagaaaacttgctaatacaatggcctgaaatttcatactaactccttaattgcgtttggtttgacttattaagtctggttgctatttttataattgccaaataagaatattgccaattgttataaggcatttaaaatcagccaactagctgtcaaatatacagagaatttaactcactaaagttaagaagattgaaaagtcttaaacatattttcagaataatcggatttatatgtttgaaaattattatattggacgagcatacagaaaaagcaaatcacctttacatataaaagcgtggacaaaaaacagtgaacattaatagagataaaattgtacaacttgtagataccgatactattgaaaacctgacatccgcgttgagtcaaagacttatcgcggatcaattacgcttaactaccgccgaaagttgcaccggcggtaagttggctagcgccctgtgtgcagctgaagatacacccaaattttacggtgcaggctttgttactttcaccgatcaggcaaagatgaaaatcctcagcgtaagccagcaatctcttgaacgatattctgcggtgagtgagaaagtggcagcagaaatggcaaccggtgccatagagcgtgcggatgctgatgtcagtattgccattaccggctacggcggaccggagggcggtgaagatggtacgccagcgggtaccgtctggtttgcgtggcatattaaaggccagaactacactgcggttatgcattttgctggcgactgcgaaacggtattagctttagcggtgaggtttgccctcgcccagctgctgcaattactgctataaccaggctggcctggcgatatctcaggccagccattggtggtgtttatatgttcaagccacgatgttgcagcatcggcataatcttaggtgccttaccgcgccattgtcgatacaggcgttccagatcttcgctgttacctctggaaaggatcgcctcgcgaaaacgcagcccattttcacgcgttaatccgccctgctcaacaaaccactgataaccatcatcggccaacatttgcgtccacagataagcgtaataacctgcagcatatccgccaccaaaaatatgggcgaaataactgctgcgatagcgtggcggtatagcaggaagatccatattttccgccaccagcgcccgcaattcaaaatcatcgacatcctgcattgcttcgttttcttccaggcaatgccagcgcatatcgagaagtgcggcgctaagcagttcgctcatctcataccctttgttgaacaggctggcattacgcattttctgttgcagttcgtcaggcattgctgccccgctctgataatgccgggcgtagcgagcgaatacctgcggatgcgttgcccagtgttcgttgatttggctcggaaattcgacaaaatcacgcggcgtgttggtgccggaaagcgtggcataacgctggcgggcaaaaaggccgtgcagcgtatgaccaaattcatggaataaggttatgacatcatcccagagtaacaacgcaggctcaccggcagcgggtttctgataattgcagacgttataaattaccggatgtgttttattaagcgtactttgctcaacaaaattgcccatccatgcaccgccgcttttactatcacgggcgaagaaatcaccgtaaaataacgccagccccacgccattatgatcaaaaatttcccacacacgaacgtcaggatggtagacaggaatatcaaaacgttcgacaaacttaataccgaagagctgattcgcggtccagaatacaccttcatttaacaccgtgtttaattcaaaatatggcttgagctgcgcctcatcaagatcaaatttctcccgccgtacctgttccgcataaaatgcccagtcccacggctgcgcgctaaacccgccctgctgcttatcgataaccgcctgtatggaggctaattcatcgctcgcacgttgacgcgccgctggaacaatttcccgcataaagttaagtgctgcttcaggtgtttttgccatctgatcggcgattttccatgcggcataatgaggaaaaccaagtagtgttgcctgttgtgcacggatctccaccagacgttgaatgatagcgcgggtatcattggcatcatttttttccgctcgcgtccagcccgcaataaacagtttttcacgcgtcgcacgatcgcgcatttcggcaagcgccggttgttgggtggtattcagcagcggaatcagccatttgttatccagacctttctcgcgagccgcctctgccgccagcgcaatctcttgctcactcattcctgccagctgcgcgatatcgttcacaaccagaccgccggatttatttgctgccagtaatcgctggttaaactggctggtcagggtcgcagcttctgtattcagtacttttaattttgctttatcagcttgcgcaagtttggctccggcaaggacaaaacgttgatgaatcacctccaccaggcggatggattcactatcaagccccagggattcacggcgctgccagacagcatctacccgcgcgaataattcaccgttcagatagatatcattagccagttccgccagttcagcggaaaactgctcgtcaagacgctgtaattcatcattggtatgcgccgcagtcatcgcaaaaaagacgctggtaacgcgggtaagtaattctccgctttgttccagtgccagaatagtattgttgaaatcaggcatttgcgggttaagcgcgatggcagcaatttctgcccgcttttgctgcattccctcatcgaatgccgggcgatagtgatgattggcaatttgatcaaaatggggagccagatacggcagtgtgctttgcacaaggaaaggattcattgttgtcattttcttctcctgaacgcgaggtgttccatagcgtaggcttactgataacggagtgcaatcttgcaatccagtattacccgctcttaagcatcccgtgctatgttattgacacacaaaagcgttgaggaacagtgagaagcgcagtgcccagccatcccgatactgctgctttcaccaaatccttagtgcttctttcgtgtttttctattgtcataatggttatctctaaaaaagaggtaagatgcgtactacttactcgccgttattggtattattcagaaaaagtgagtaagactttgcagcaatgtttttgatcctgttcaaataaactaatggcatcagcaacatgctggaaatcaaacgtatgggtaattaatttttctggtttaattaaccctttacttaaccagtcgataacgatcgggaatttatttgcatttaagcgactagagaaaatagagagttcttttccggtaattccttgctgaatcacttcagacggttcactggagaaccccatcaatacaatacgtgccgctggagaagccagcgttacggcctctttcaggatagaaggatgacaagccgcatcgataattaatgtcggcttgatgcctttttcagtgaaaatctcgccaagcggtgtctggctgttattaatcgcccagtcagccccgctctctttcgctttttccagtcgttcatcaatgcgatcggcaacaatcacatttttaacgttatagacgccttttaatacctgaacgatcgtcaggccgattggaccggcaccataaaccagaacggtatcattttcagtcggttgaccatgtccggttacgttagccgcaatggtaaaaggttcgatcattaccgcatattgatcggccactgcttcaggaattttccacgcattttttgccggaaccacggcatattcactgaaaccaccgtcagcgtgcacacctaatacagccagtgtcgtacaaacgttcggtttacctatagagcacggatagcaatgcccacagctgaccaccggatcgacagcaacacgttcaccgactctggcgctttccacgccttcacccactgcatcaatgacgccaaagaattcatgaccaatgacgcgcggatatttcgcaaaaggattatgcccacgataaatatggctatcactaccacaaattccggcaagtttcacttttactcgtacttcacccgcactcggggtgggtatttcacgttcgacaatcgccagttgattcggtttttcaattaatatgcttttcattatcttactccttaccagttccacagcgtgccatcttccagacgtgcgactggtagataagcaggttcatagggatatttcgccgccagcttttcatcgaattcgataccaagacccggtttgtctcccggatgcatatagccgttatcgaaagtccagttgtgcgggaagacttcgagcatttgttcggaataacccatgtattcctggacaccgaaattggggacccacagatcaaagtgcagcgccgcagccatgcagactggactcaaatcggaaggaccgtgactgccagtacgtacctgatacaggctagcaaaatcggcaatccggcgcataccggtaattccgcctgcatgggtcagcgtggtgcggatataatcgatgagttgctcttcaatcagttgtttgcagtcccagatgctgttgaagacttcacccactgcgatgggtgtgacggtatgttggcgaatgagacggaagcattcctggttttccgcaggcgtcgggtcttccatccagaacatgcgataatcttcaatgcttttaccaaagcgcgccgcttcaataggcgttaagcgatggtgcatgtcatgcagcaaatgttcattaaaaccaaacttgttacgtaccgcgtcaaacaatttcggcatgaaatcgaggtatttctccgtgctccacagctgctcttccggccactgtcctttggttgcgggttcataagccagacctttacctttgctcatgccgtaggtggttttcataccagggattccgcactgcacgcggatggctttgaatccaagctcttgatgacgggcataatcatccagagcttcatcaatactgtgaccggtggtatggcaataaaccatcaccccttcacgagacgcgccgccgagtaactggtaaagcggcatgttggcagctttggctttaatatcccacagcgccatatcaaccgcactaatggcgctcatcgtaaccggaccgcgacgccagtaagcacctttatagaaaaactgccagatatcttcgatacggtgcgcatcgcgaccaataagctgcggacaaaggtgatcctgcaaataagaggccacggaaagctcacgtccattgagggtggcatccccaaggcccgtaataccgtcctcagtggtgatttttaatgtgacgaaattacgccccggacaggtaacaaaaacttcagcctttacgatcttcatgttcgattccttgcatcgcttgtcgtgatgcatgaaatctacgcaactgagctactaccatacaagtataaagatcgaaaaaagccggagtgatcacaaaaaaaggcgtatatttgcgctgtgaatggttgacaaaagatgaaatagaataccttttgtcagctgacacttcctcttatcttattgataaaatggatttatgttcttacgtgcgcccccagcccgcaacaatgatcaacatgccgcaaagcgcaatcaacgcacccgtccagtcataaagagtcagtttcacgccatccacaacgcgcagccacatcaacgccgtgcagacataaacgccaccataagccgcgtaaacacgcccactcgccgctggatgcaacgttaacaaccagacaaacagcgccagactaatccccgccggaagcaacagccagatactggcgtttcgttttaaccacaaccagggcagaaagcatccaataatttcacacagcgcagtagcaaaaaatagtaacgttgttttaatcatctttgtctcttattgacatcatgtatagttatagggcgacataatatcatcaatataaacaccctcctggtacgttttgcgtccgcagtggatggtgtagaatcacctttaatcattcatacagggaatgaattatgaaaatcactctcagcaaacgaatcggcctgctcgctattctgctgccttgcgcactggcattgagcacaactgttcatgccgaaactaacaaactggtgattgagtctggcgacagtgcacaaagccgccagcacgccgctatggaaaaagagcaatggaatgacacgcgcaatctgcgccagaaagtgaataaacgcactgaaaaagagtgggataaagccgacgccgcttttgataaccgcgataaatgtgagcaaagcgccaacatcaatgcctactgggagcccaatactttgcgctgcctggaccgtcgaactggccgcgttattaccccctaacctgttattgatttaaggaatgtaaggacacgttatgccaagcgcccacagtgttaagctacgcccgctggagcgtgaagatttacgctatgtacatcaactcgacaataacgccagtgtgatgcgttactggtttgaggaaccctacgaagcctttgttgaactctctgatctgtatgataagcatattcacgatcagagcgaacggcgctttgtggtggaatgtgacggcgaaaaagccggtctggtggagctggtggaaattaaccatgttcatcgccgcgcagaatttcagataattatctccccggagtatcaggggaaaggtctggcaacccgtgccgccaaattagcaatggactatggctttaccgttctcaatctctataagctgtatctgatcgttgataaagagaatgaaaaagcgattcacatttaccgcaagcttggctttagcgttgaaggtgaattgatgcacgagttctttattaatggtcaatatcgtaatgccattcgcatgtgtatattccagcatcagtatctggcagagcacaaaacaccgggtcagactctcctgaagccgaccgcacaataacattaataataatcgatcgtatttttgatggtgtaaacccgttcgacggcgggttttactccttcatcaacaatgattagctgacagtccaccggattagcgtgactgtcatattcacagctctgttttacattaccaacccgttgattattcagtaaagtaaccgctgtgtaatctaattttttgatcggatccgtacttggcgtggcgctgacagataatgttttgtcgttacttttcgtggttttacccagcggataaccctgatcatcatagcgatattccatctgcatttgtttgctgctggctttaatcacgaagccattatcatcggtttcccaactcaccccggcagaaggtaattctgctagctggcattttccctgtaaacgtactctcttctccagcgtctcggcatcacggtaataattggcgtccagtaccagagcgaccacggtattattttccagatccagtaattcgagactatcaaaacagccttcttcgctcaaagtcccagaaacacgtttcgtcacttcaccttgctcatccattaatgtctgagtgaaatcttttaccggaccacgcagcggatcaaaatcgaattcattagagaaactggccatctcaggggtaaaactaagtgttacctctgtgcggtcacatcctgtgaggaatatcgcgagtaagcatggtagtaatttgtatttcacaacagtcaccagagagtagagatgattctcaatcatagtagcaaatacagtactttacacgttaaatgctatgcttaaagaagttatcttcgcgtaaggagcttatgatgaaactcagtacctgctgtgccgcgcttctgctcgccctcgccagtcccgcggtactcgccgcgccgggatcctgtgagcgcatacagagcgatataagtcagcgcattatcaataatggcgtacccgaaagcagcttcacgttaagtattgtacccaatgaccaggttgatcagcctgattcccaggtcgtcggccattgcgctaatgatacgcataaaattctctatacccgcaccaccagcggtaacgtctctgctcccgcgcagtctagccaggatggcgcgcctgccgaaccgcagtaacacattatcgactgaacgccggatatgacaaatccggcgatttgaacatacaacataatcccaccttattactcatacccttctattgatatggattaataattcttaacccaaaatgggtagactccctctattgttagcgcgctaaatattcaatatataaacttttatataacgataaagaacagggagtgagttatgtccaaaaatgaacgaatggtgggcatcagccgcagaacactcgttaaatctaccgcgataggttctctggcgctggctgcaggcggtttttctttgccgtttaccctgcgcaatgcagcagcagcggtacaacaggcccgcgaaaaagtggtctggggtgcctgttccgtcaactgtggtagccgctgtgcacttcgtctacatgttaaagataatgaagtgacctgggtggaaactgacaataccggcagcgatgagtacggcaaccatcaggtacgcgcctgtttgcgcggtcgctccatccgccggcgtattaatcatcccgatcgcttgaattacccaatgaaacgcgtgggcaaacgcggcgaaggcaaattcgaacggattagctgggatgaagccctggatactatcgccagtagcctgaagaaaaccgtcgaacaatatggcaatgaggctgtatatattcagtactctagcgggatcgttggcggcaatatgacccgctctagcccaagtgccagcgcggtcaaacgcctgatgaactgctacggcggtagtctcaaccagtatggctcctacagcactgcgcaaatttcctgtgccatgccctacacctacggcagtaatgatggcaacagcaccacggatattgaaaacagcaagctggtcgtgatgtttggtaacaacccggcagaaacccgcatgagcggtggtggcatcacttatcttcttgaaaaagcgcgcgagaaaagcaacgccaaaatgattgttatcgatccgcgatataccgatacggctgccggtcgtgaagacgaatggctccctattcgcccgggcaccgatgccgcgctggttgcgggtattgcctgggtattgattaacgaaaatctcgttgatcaaccttttctcgataaatactgcgtcggctatgacgaaaaaaccttacccgcagatgcacccaaaaatggtcactataaagcctatattcttggtgaaggtgacgataaaacagcgaaaacgccgcagtgggctagccaaattaccggtatcccggaggaccgtatcatcaaactggcgcgtgaaattggcacagcaaaacccgcttatatctgccagggctgggggccacaacgccaggcaaacggcgaactgactgcacgcgctattgctatgttacctattttgacgggcaatgtcggcatcagcggcggaaatagtggcgcgcgtgaaagcacctataccattaccatagaacgcctgccggtgctggataatccggtcaaaacgagtatctcctgcttcagctggacagatgctatcgatcatggtccgcaaatgacggcaatccgcgacggcgtccgcggcaaagataaactggatgtgcccattaagttcatctggaactacgcgggaaataccctcgttaatcagcattctgacatcaacaaaacgcatgaaattctgcaggacgaaagcaaatgcgaaatgattgtggtcatcgaaaactttatgaccagtagcgcaaaatatgccgacattctgctgccagacctgatgaccgttgagcaggaagatattattcctaacgactacgccggtaacatgggatatctcattttcctccagcctgtcaccagcgaaaaattcgaacgcaaaccgatttactggatcctgagtgaagtcgcgaaacgtcttggacctgacgtctatcaaaagttcacagaaggtcgcacgcaggaacaatggttacaacatctgtacgccaaaatgcttgccaaagatccggcgttaccgtcttacgacgaactgaaaaaaatgggtatctataagcgtaaagatcccaatggccattttgtcgcctacaaagcatttcgtgacgaccccgaggcaaatccacttaaaacgccttccggtaagattgaaatttattccagcaggctggcggaaattgcccgtacctgggaactggaaaaagatgaagtgataagcccattgccagtttatgccagtacctttgaaggctggaactcccctgaacgtagaaccttcccactgcaactgtttggtttccattacaaatcccgtactcacagcacctacggcaatattgatctcctgaaggctgcctgccgtcaggaggtgtggatcaaccctatagatgcgcagaaacgtgggattgccaacggcgatatggtgcgggtgtttaaccatcgtggcgaagttcggctaccagccaaagtaacaccacgtattctccctggagttagcgctatgggccagggagcctggcacgaggccaatatgtctggcgataaaatcgaccatggcggctgtgtgaatacgctaaccactctgcgccctagtccactggcgaagggaaacccgcagcacactaatctggtcgagatcgaaaaaatataacccacgacaaccataaattctggcatgacattttgtttgaaaagcaataagtgagtaatgatgaaaatccataccacagaggcgctcatgaaggctgaaatcagccgtagaagtctgatgaaaacctccgcacttggcagtcttgcgctggcaagcagtgctttcactctgccattttcccaaatggtccgggcggcagaggctccggtagaagagaaagcggtctggagttcctgcaccgttaactgcgggagccgctgtctgttacgtttgcatgtgaaagatgacaccgtgtactgggtggagtctgatacgacaggtgacgacgtctacggtaatcatcaggttcgagcgtgtttacgcgggcgctctatccgccgacggatgaatcatcctgataggttgaaatatcccatgaagcgcgtcggcaagcgcggtgaaggtaaatttgaacggataagttgggacgaagccctggataccatcagtgataatcttcggcggatcctgaaagattacggcaatgaggctgtacatgtcctgtacggaacaggcgtagatggcggaaacatcaccaacagtaacgtcccgtaccgtctgatgaactcttgcggtggttttctcagtcgctatggcagctacagtaccgcacagatcagtgccgcaatgagttatatgttcggtgccaatgatggcaacagcccggatgatatcgccaatacgaaactggtcgttatgttcggaaataacccggcagaaacgcggatgagcggcggtggtgtcacttactacgtcgagcaagcccgcgaacgtagtaacgcacgcatgatcgtcatcgatccacgttataacgacactgctgccgggcgtgaagatgaatggctgcccattcgccctggcaccgatggcgcactggcctgtgcgattgcctgggtactgattactgaaaacatggtcgatcagccatttctcgacaaatattgtgttggttacgatgaaaaaacgctgcccgccaacgcaccacgtaacgcgcattataaagcctatattctgggcgaagggcctgacggcatagctaaaacgccggaatgggcagcaaaaatcaccagcatcccggcagaaaaaattatccagttggcacgagagatcggtagtgcaaaacctgcttatatttgtcagggttgggggccacaacgacattccaacggcgagcaaacatcccgcgctattgccatgcttttcgttctcaccggcaacgtcggcataaacggcggcaacagtggcgtacgcgaaggtagctgggatctgggggtagaatggttcccgatgctcgagaatcctgttaaaacgcagatttccgtctttacatggacagatgccatcgaccatggtacggaaatgaccgcgacccgtgatggtgttcgtggaaaagaaaaactggatgtccccatcaagtttttatggtgctacgccagtaacacattgatcaatcaacatggcgacatcaatcacacccatgaggtgcttcaggatgacagcaagtgcgagatgattgttggcattgaccacttcatgacggccagcgctaagtattgcgatatcctgttgcccgacctgatgccaacagagcaagaagaccttatctctcatgaatctgcagggaatatgggctatgtgatcctcgcccaacccgcaaccagtgcaaaatttgaacgcaaacccatctactggatgctgagtgaagtcgccaaacgcttaggaccagacgtttatcaaacctttactgaaggtcgcagtcagcatgaatggatcaaatatctccatgcgaaaacgaaggaacgtaaccctgagatgcccgactacgaggagatgaaaacgaccgggatctttaagaaaaaatgcccggaagaacactacgtcgctttccgcgcattccgtgaagatccacaggcaaacccgttgaaaacacctagcgggaaaatcgaaatttattctgaacgactggcgaagattgcagatacctgggaattgaaaaaagatgaaattattcatccccttcctgcgtataccccaggttttgatggctgggacgatcccctgcggaaaacctatccactgcagttaacgggcttccattacaaagcgcgtacccactccagctacggcaatattgatgtgttacagcaggcctgcccacaagaggtgtggatcaaccccattgatgctcaggcacgcggtatccgtcatggcgataccgtgcgggtatttaacaataatggagaaatgctgattgccgcaaaagtgactccgcgtattctgcctggcgttaccgccatcgggcaaggtgcgtggcttaaagcggatatgtttggtgaccgggtcgatcacggcggcagtatcaatattctgacctctcaccgccctagtccgctggcaaagggaaacccgagccacagcaatcttgtccagatcgaaaaggtttaaggagtagcccatgaccacacaatatggattttttatcgattccagccgctgtactggctgtaaaacctgcgaactggcgtgcaaagattttaaagatcttggcccggaagtcagtttccgccgtatttatgaatacgctggcggcgactggcaggaagataatggcgtctggcaccagaacgtgttcgcttattatctctccatctcctgtaaccattgcgatgaccccgcatgtacaaaagtctgccccagcggcgcaatgcataagcgtgaagatggctttgtggtggttgatgaagatgtttgtatcggctgccgctactgccacatggcttgtccgtacggcgcgccacagtacaatgctgaaaaagggcacatgacgaagtgcgatggttgttatagccgcgtcgccgaggggaaacaacccatatgtgtcgaatcctgcccgctgcgtgcacttgagttcggtccaattgaagagctgcgccagaagcacggcactcttgctgccgtcgcgccactgccgcgcgcgcatttcacaaaacccaatatcgttatcaaacctaacgccaacagccgcccgaccggcgataccactggttatctggctaatccggaggaagtgtaaaatgggaaatggatggcatgagtggccactggttatctttaccgtattgggtcaatgcgtagtaggcgcgctgattgttagcggaattggctggttcgccgccaaaaatgacgcagaccgtcagcgtattgtccgtggcatgtttttcctctggctgttgatgggcgtcgggtttattgcctctgtcatgcacctgggaagcccactgcgggcgtttaactccctgaatcgaatcggagcttctggtctgagtaacgagattgctgccggttccatattttttgccgttggcggattatggtggctggtggcagtcatcggtaaaatgccgcaagcgttggggaaactctggttacttttcagcatggcgctcggcgtcattttcgtctggatgatgacctgcgtgtatcaaatcgacaccgtgccaacctggcataacggttacactacgctggctttcttcctgacggtattgttgagcggtccaatacttgctgccgcaattctgcgggcagctcgcgttacatttaataccacaccatttgccatcattagcgttctggcgctgatcgcttgtgccggggtgattgtgctgcaaggtttgtctctggcgtctattcacagttccgtgcaacaagccagcgcactggtaccagattacgcctccttacaggtctggcgtgtggtattgttatgcgcaggtcttggatgctggctttgcccgctcattcgtcgccgtgaacctcacgttgccggacttattctggggctaatcctcatacttggcggtgagatgatcgggcgtgtgctcttttatggcctgcacatgacagtaggaatggctattgcaggttaacaaattggtgcggggcaacccgcacatttcaggatgttaggaatgacccattttagtcagcaagataatttttctgtcgcggcgcgcgtgttgggcgcgctgttttattacgctccagagagtgcggaagccgcacctctggttgcggtactcaccagtgacggctgggaaactcagtggcctctaccagaagcgagtttagcgccgctggtgacggcttttcagacacagtgtgaagagactcacgcccaggcctggcagcgtttgtttgtcggcccgtgggcactgccgtctccgccgtgggggagcgtctggctggatcgcgaatctgtgctgtttggcgatagtacattggcacttcgtcagtggatgcgcgagaaaggcattcagtttgaaatgaagcaaaacgaaccggaagatcattttggtagtctgctgttgatggctgcgtggttggcggagaatggtcgccagacagaatgcgaagaattgctggcatggcacctttttccgtggagtacacgttttcttgatgtttttatcgaaaaagcagaacaccctttctaccgtgcactgggtgaactggctcgcttaacgctggcgcaatggcaaagtcaactgttaattcctgtcgcggttaaaccgctgtttcgataagatcaccgtaatattgccggatggtgacgattacgcgcaatccggcaataataggttacagtgtcacgtttttttatctcttaaagcacgcactgcttttgcggctggcctcttttgccgcaaaatagtcgcccgtgtttcattgcccatttctgctcatgcatcatctacacatctatccggatctgcgcactatgttccaccgtctgcttatcgcaacagtcgtcggtattctcgcggcctttgccgttgccgggtttcgtcatgcgatgctgctactggagtggttgttcctcaataatgactccggcagtctggtcaatgcagcgacaaacctttccccctggcgacggttgctaactccggcgctcggcggactggcggcgggtttgttgctgatgggctggcagaaatttacccaacaacgccctcatgcgccgaccgattatatggaagcgttgcaaaccgatggacagttcgattacgcagcaagcctggttaaaagccttgcctctctgctggtagtaaccagcggcagtgcaattggtcgcgaaggtgcgatgattcttttagctgcccttgccgcctcctgttttgcccaacgttttacgccacgccaggagtggaaattatggatcgcctgtggggccgcggcgggaatggctgcggcctatcgtgccccgcttgctggcagtttatttatagccgaagtgctgtttggcactatgatgttggcctctctcggcccggtgattatttccgccgtcgtggcattgctggttagcaatctgattaatcatagcgacgcgttactctacaacgtacaactcagtgtgacggttcaggctcgtgactatgcgctgattatcagtacaggtgtgctggcaggtctgtgcggaccactgttgttaacgttaatgaacgcctgtcatcgtggatttgtgagtctcaaacttgcgccgccctggcaactggcactaggcgggttgatcgtgggtctgctttccctgttcacacctgcagtgtggggcaacggctatagcaccgtacaatcctttttaaccgccccaccactgttaatgatcattgccgggatcttcctttgtaaactgtgtgccgtgctggcgagtagcggttccggcgcacccggtggggtctttacaccgacgctatttatcggtcttgccattggcatgttgtatggtcgtagcctgggattatggttccctgatggcgaagaaattacacttttactcggattgaccgggatggcgacactgttggcggcgaccacgcacgcgccgattatgagcacgttgatgatatgtgaaatgaccggggagtatcagctactccccggtttattgattgcctgcgtaattgcgagcgtaattagccggacgttacaccgtgactctatctaccgccagcacactgcgcagcatagctaagcggatgtattgccccagttcacgctgttcggcgcgcggcagataaggcagttcaccaatgagcggtgccggaagttttttacccagcacatcaatgatttccgcataatgcgccagtcctgggttgattcggttagccacccagccaatgagcggcagcccgtcgttggcgatcgcctgagctgttagcagtgcatggttaatgcaaccttcctgaataccgacaaccatcaacaccggcagttgttcctgcactacccattcagagagtggacgcaaatcattcatcagactgcgccagccgccagtcccttctaccacgacatgatcgactttttcggtcaggtttgccaggccgttactaatgagggtgtaattgattgggcaactgtgcgccacgctactttcttcttcgcttaacgcgataggattaactgcttcataaggcagttcgatggtactaacactctgcaacaccagggcatctttattacgcagcccttcgggtgtctctttgctccccttcgctacgggtttatatcccgcaaccgtttttccctgggaggctaacgcttgtagcaatgcgcgggaaaccaccgttttccctacagaagtgtctgtaccggtaataaagaaacgcttcagcatcactaactccaccgttatgcttcacaaatataaaccaggaaaataattaaccttgaaagtctaagttatgctttcctggcccaaattgagatagcgcaaattttggtagaacagttaaaaaatgttaaccctgcaacagacgaatcaacaaagaaccgttatacatcgcgtcttttaccagtgcagcgcctgccatcgtgccctggttagaaaactgagtactctcaacgctgatgtgctgactatacgcaggaagggcctgctgacggatgctgtcactgatgaccgggaagaggatatctgccgctttacttaacggactgccaatcagtattttttgtgggttaaataaattcaccatgatggcaagaatgcgcccgacatgcgcgcccaccccggtaatgatgtcttttgccagtagatcgccgcgcaatgccgcctgacacaaactgtccacggttaacggttgtccatgtaacatgctgctcatggattgattaagacgcagctgtgccagctcaagaatactgtccacgctggcgatggtttcgaggcagccgtgattcccgcaataacagcgtttcccatacgggtcgacctgtgtgtggcctatttccacgagactactgctgcctgcgtgtagcagatgaccatcggtaatgacgcccgcccccacgttgtgatcgataaccacctgaatcacatcgcgcgccccgcgactggcaccaaacaaggcctctgccatcgtccatgcgctgatatcatgctgaatataaaccggaacgccggtatgctgctccagcgcctcgccgagcggcatctcttttacatcctcgtagaacggcatgcgatgtacaataccattttccgtatcaataattcccggcaaggttatggcaatgctagttagacgctcaagttttttctggtggcggataaaaaactgatcgatatgggaaataatacgatccagcaatggcaagtcatcttttaacgccagttcctggctctcttccaccaccagtttgctgctcagatcgcgcagagcaaggaaaatctccccgcgactaatgcgcagagaaagatagtgccaggcttcagtttcaaccaccagccccaccgccggacggccacggttccccgcttctttgatttccagctcttgcaccaggtgtgcttcgagcatctcacggacaattttagtgatactggcaggagccagttgcgccagacgggaaagatcgatacggctgactggaccaagctgatcaatcaggcgataaaccgcgcccgcgttggtctgctttatttgatcaatgtgcccaggctggttttcagcaaccaccgcatactccctatattttcgcgctccgaaataatctgtaggctatggtgaagcacttcaatacgtgtcgtcaaatttttacttaggcatgtgattaacagcacatttttcgggctttttcgctgaaatttccctcacctgagagcattcagcagatgaatacgaaagttacgcgcagccggactttgttcatgatgtttcggccagaccaaccacatttcagaaaccgcatcctcttcagcaatcggcacccagcgcatttcgttgagctgaacacgtttaaaactcgcaggcaaaatactaacacccagaccggcggaaaccagaccgatgatggtcattgcctcgcccacctcctgagtgatgacgggcgtcaaatggtaacgtcgcatcagcccgagaatatcgtcatacagccctgtcccgacgtgcggatcaaaaaagacaaagggttctttcgccagttcagccagcgttacattcgggttatttgccaggggatgatcgtgcgggatcatcgccataagcggttcatggacgatgactgcgtgttcaaggctctccggtaacgctgtgttacgcagcaatcccatatccagcgttccttcaatgagcggagcgatttgctcgcgagtgttcatttcgcgggtttgtaaatggacatcaggataatcacggcgaaacaggcttaacgtatcggacaccgcccgaataaaaggagcgctgctagtaaaaccaatgcgcaactcccccgcttcaccctgatgcagcctttcagcgcgagcggcagcgtcatccaccatagacaggatttgccgactatctgcaagaaactgttttcctgctgccgtcagcaatacactgcgattggttcgtgccagcagtcgggcaccaatttgttgctccagcgcctgaatctgctgacttagcggcggttggctaatattcaggcgggcagcggcgcgcccgaaatgcagctcttccgcaacagcaacaaagtaacgcagatgacgaagttcaatattcatatttaaaacatcttatttgagattattaatatattagacagaacaattcgattttcctaccctatgtataagcctgatctacaggcatatttagcaaggatttcaagtgagccgtactacaactgttgatggcgctccggcaagcgacactgacaagcaaagcatttctcagccaaatcaatttattaaacgcggtacgccgcaatttatgcgcgtcaccctggcgctgttctctgccggactggcaacatttgcacttctctattgtgtgcagcctatccttccggtgcttagccaggagtttggcttaacccccgcgaacagtagtattagtctgtccatttccacggcgatgttggctattggtttgctgtttactggcccgctatccgatgccattggtcgcaaaccagtgatggtcacggcgctactgttggcctccatttgtacgttacttagcacaatgatgaccagctggcacggcattttgattatgcgcgccttgattgggcttagcttaagtggcgtggcagctgttggcatgacttatcttagcgaggaaatccatcccagtttcgtggcctttagtatggggttgtatatcagcggcaacagtattggcggcatgagcggacgcttaattagcggtgtcttcacggactttttcaactggcgaattgctctggcggcaatcggttgtttcgcgctggccagcgcgttgatgttctggaaaatcctccctgaaagtcgccattttcgcccgactagcctgcgccctaagacgttgtttatcaactttcgtctgcactggcgtgaccggggattaccgttattgttcgcagaaggctttttgctgatggggagcttcgtcacgctgtttaattacatcggctatcggttgatgctctccccctggcatgtcagtcaggccgtggttggcttattaagcctggcttatttgaccggtacatggagcagtcccaaagccggaaccatgaccacccgctatgggcgtggtccagtgatgttgtttagcacgggggttatgctgtttggtttactgatgaccttattcagcagcctgtggctgatctttgccggaatgttactcttcagtgcaggattcttcgcagcccacagtgtagccagcagctggatcggcccccgcgcaaaacgcgctaaaggccaggcctccagcctgtatctgttcagttactatctggggagcagtattgccgggacgctgggtggtgttttctggcataactatggctggaacggcgtcggcgcatttattgctctgatgctggtcattgctctgctggtcgggacgcgtttgcatcgtcgtctgcacgcctgaaaaataagtccggactgcggtaaatacccgtccggacttattgccagctcaaaccaacgttaatagccatcctaaaatagacgaagcgccagccaattcccgcagcgcgtctagcgtcatcaggattataagtacccaaataaacggattcattttgctgtgtgtcatttattactgatgcgcagttattctactgctttgtaagtagtaaaatagttaacccgatcaagactactattattggtagctaaatttcccttaagtcacaatacgttattatcaacgctgtaatttattcagcgtttgtacatatcgttacacgctgaaaccaaccactcacggaagtctgccattcccagggatatagttatttcaacggccccgcagtggggttaaatgaaaaaacaaattgagggtatgacaatgaaaaaagtattagctctggttgttgccgctgctatgggtctgtcttctgccgcctttgctgcagagactacgaccacacctgctccgactgcgacgaccaccaaagcagcgccggcgaaaactacacatcataaaaaacagcataaagcagcacctgcccagaaagcgcaggcggctaaaaagcatcataaaaatacgaaagctgaacagaaagcccctgaacaaaaagcgcaggcagcgaagaaacacgccaagaaacacagccatcagcaaccggcaaaacctgctgcacaacccgcagcgtaagttttcaacagtaatgctggcgcgccccctcgcgcctgaaaattacggtgctaagcgggtaacgtttagcaccgcctttagcggagggtagtatggtgggccgttatcgctttgagttcattctgatcatccttattttatgcgcactgattaccgcccgtttttatctttcctgattgtagttatctgattttactcccactttcatcccgtcccgtctatagtatttatgagggtttgcttttaataatcataattacccaccagagtgtgatatgcgtacaaccattgctgtagtgttgggtgcaattagtttgacgtctgcttttgtgtttgcagataaaccagacgttgccagaagcgcaaacgatgaggtcagcaccctgttttttggtcatgatgatcgtgtgccagtgaatgacacgacccaaagtccgtgggatgcggttgggcaactggaaacggccagcggcaatttatgtacggcgacgctgattgcacccaatctggcattaacggcaggacactgtttattgacacctccaaagggtaaagccgataaagcagtggcgctgcgttttgtgagtaataaaggtctttggcgctatgagatccacgacatagaaggccgcgttgatccgacactgggaaagcggttaaaagcagatggggatggttggattgtacctcccgcagccgcgccgtgggacttcggattgattgtgctacgtaatcccccttctggcattacgccgttgccgttatttgagggagataaagccgcgcttaccgccgcattaaaagcggcaggtcgtaaagtgactcaggcaggctaccctgaagatcatctcgatacgttgtacagtcatcaaaactgtgaagtgactggctgggcgcaaacgagcgtgatgagtcatcagtgcgataccttgccgggtgacagcggtagccctctgatgttgcataccgatgacggctggcaattaattggggtgcaaagtagcgctcctgccgcgaaagatcgctggcgcgccgataaccgggccatttctgttaccggttttcgcgacaagctggatcaactgagccaaaaataatgttcaaacgctgcccgacagcgcgggcagcgtcttcatcaggcaagtttcaccatgatcattccagccaacagcaagaccaggccaatccagcctttacgatttaaccgttgaccaaacaagatccaacctgcggctaacgtggcggcaataccaaacccgccccacaatgcataagcgacagacaagtcgatccctttaacggcttgagaaagcgcactaaaggcagccagcaccgccgccagggagagcaagccaaatattttgcgacgaaagccgtcagaaaatttcaaaaagacgttagcaacgatttccagcacgattgccaatgccagccaggcggcgtgaacccattcaaactgcgccatggttcacctccagttcaggtttacgcgctttacgggtaccactttttatcaacacaatcccggcgaccagggtggttaacccggcaattttcatcaggcttaaactttcgtcgaataacaaaacgctaaacaaggtaataaataaaataccgataccttcccacagcgcataagctacgcctaaggcgatttttttaacggcgaaagagagaaatatatagctcagagaaatcatcaccagcattaaaataaagccgccatttccctcactgacgctcgcccatttcatactcagcgtaccggtaatttctgtagcaatagccagacctaataaaatccaataaatatacattgtccttctcctgcaagagaattattttaattttcgcttaattcagcgaaaccaaagtaaagtggtcaagccccgcgcatagcgcaagctttggcagaagaaaggactaaagcgcgttgcgccagtgctgctcacctacgagcaagatagtggatgaggtacgaagatgggtaaatgtagaaaataacgtcctgaacaaattgtccataatattacaattatccgcagtgttgcttctcgtcatcgcggatgataattgtcctcggtagttgaacacgcctgatttgtatcatagcttaagaattaactcaaaatattttcacttctttacctgagcggtttgattttcgttatgatgacggagcgaaaaagacattattattagcaaaggaagaaaaaacggggacaagcatggcaaagccgatcatcacgctcaatggcctaaaaatcgtcattatgttgggaatgctggtcattattctctgcggtatccgttttgccgccgagatcatcgtgccgtttattctcgcattatttattgctgttattcttaacccgctggtgcaacacatggtccgctggcgtgtgccgcgtgtactggcggtgagcattttgatgaccatcatcgtgatggcgatggtgttgctattagcttatctgggttccgcgctcaacgagttgacgcggacgttaccgcaatatcgcaactctattatgacgccgctgcaagcgcttgaaccgttgttgcaacgcgtagggattgacgtcagtgttgaccagctggcgcattatattgatccgaacgcggcgatgacgttgctcaccaacttattgacgcagttatctaatgccatgagtagtatatttttattgctgctgacggtgctgtttatgctgctcgaagtgccacaattgcccggaaaatttcagcaaatgatggcgcgtccggttgaagggatggcggcgattcaacgtgcgattgacagtgtttctcattatctggtgctgaaaacagccatcagcatcatcaccggcctggtcgcctgggcgatgctcgccgcactcgatgttcgcttcgcttttgtctggggattgctggcctttgcgcttaattacatcccgaatattggtagtgtcctcgcggcaatcccccctatcgctcaggtactggtgtttaatggcttctacgaagcgttgctggtgctggcgggatatctgctgattaatctggtcttcggcaatattctggagccgcgtatcatggggcgtgggctggggctttccacattggtggtatttttgagcttgattttttggggatggttgttaggaccggtgggtatgctgctttccgtgccgttgacaattattgtcaaaattgcgcttgaacaaacagcgggaggtcaaagcatcgccgttctgttaagcgatctcaataaagagtgacggcctcagcagaggccgtcagggttacagagctttcaggattgcatccacgctggctttggcgtcaccaaacagcatgtgggtgttttccttgaagaacagcgggttttgcacaccagcatagccagtgttcatgctacgtttaaagacaatcacgttctgcgctttccacacttccagcacaggcataccagcaatcggactcttcggatcatcctgcgccgccgggttaaccgtatcgttagcaccaatcaccagtacggtatcggtatcagcaaagtcatcattgatctcgtccatttccagcacgatgtcatacggtacttttgcttcagccagcaatacgttcatatgtccaggcaaacgccccgcgaccgggtggataccgaaacgcacattaataccacgagcgcgcaatttctcagtaatttcagcgacaggatattgcgcctgcgcgactgccatgccgtaccccggagtaatgatcacactatgggagtttttcagcagttccgctgtctcttctgcggtgatttcgcggtgctcacccacttcctgatcatcgccagtagaagagccgtcggtgccgaaaccacccgcaataacgctgataaaggaacggttcatcgccttacacataatgtaagaaaggatagccccgctagaaccgaccagcgcaccggtcacaatcagcaggtcgttgctgagcataaagcccgcagccgcagccgcccagccggagtagctgttcagcatgctcaccaccactggcatatctgcaccaccgatggaggcgactaaatgccagccgaataccagcgcaattgcggtcattatcagcaatgccagcacttgcaggccgacgctgtccgtgcgaacaaatacaatcagcagcaggaaggaaacgaccagagccgccaggttcattttgtgacggtttggcagcatcaatggtttagagctaatcttgccacacagtttgccgaacgccaccacgctacccgtgaacgttaccgccccgatgaagataccgaggaacacttccgtcaggtgaatattgaccagaatcggtgccattcccgcgtcatgatgcagatagctgttaaagccaaccagcactgccgccagacccacgaagctatgcaggatcgccaccagttctggcatttcggtcatttcaactttcttcgccagacggataccaattgccccaccaatgaccatcgccagcaagatccagccaacattacccgtatccggtccaaaaatggttgcgattaacgcaatcgccatcccggcgataccgaagttgttaccctggcgagacgtttcatgtttgctaagaccggccagactgaagataaacaggatcgcggcaacaatgtatgcagctgtaactaatcctccagacatatgttaccccttaatttttgcggaacattttcagcatgcgctgagtcacggtgaagccaccgaaaatattaatgctggctataagcaccgcgataaaactaaggaagctaacccagccgccctggccaatctgcaacagtgctccgacaacaataatcccactaatcgcgttggtgacgctcatcaacggtgtatgcagcgcgtggcttacattccacaccacgtaataaccgacaacgcaggccagcgcgaaaacggtgaagtgcccaaggaattctttcggcgcaacgcttgccatccagccaaaaagaatgattgccagcgccatcaacgcgtatttacgccacggactgcaggtacatttttcctcagttttcacttccggtgccgctttttgtgccgcctgcggctgagcacttacctgaatcggcggtgccggccaggtaatttcgcccgcacggatcacggtcacgccgcgaatcaccacatcatcaaaatcaacagtgatattgccgtctttctctttgcacaacagtttcagcagattaacgaggtttgtgccgtaaagctgactggattgcgtcggcagacggcccggaagatcggtataaccaatcactttgacaccattttccgtagtgaagatttcacccggcacggtgtattcacagttgccgccgttttgggctgccaggtcgacaatcacactgcccgccttcatggagtcaaccatttcacgggtaattagcttcggcgctggtttgcctggaataagcgcggtggtgacaatgatatcgacctcttttgcctgggcggcaaagagttccatttccgctttgatgaacgcgtcgctcatcactttggcatagccatcgccgctgccagcttcctctttaaaatccagctcgaggaattccgcgcccatactttgaacttgttctttcacttccgggcgggtgtcgaatgcacgcacaatcgcgccgagactgtttgctgcgccaatggcggccagacctgcaacacccgcaccaatcaccatcacttttgccggtggcactttcccggccgcagtaatttgcccggtaaagaagcgcccaaattcatgtgccgcttcaacaatggcgcgataaccggcgatgttcgccatgctgcttagtgcgtccaggctttgtgcgcgactgatacgcggcacagagtccatcgccatcacggtcacgttacgttccgcaagtttttgcattaattccggattctgcgcaggccagataaaactcaccagcgttgtcccaggattcagtaacgcaatttcatcatctaacggcgcattgaccttcagaatgatctcactctgccagacgctattcccttctacaatttcagcgcccgcttgcacaaacgctttatcgtcaaaacttgccagttgacccgcgccgctctctaccgcgacggtaaaacccagtttcagcagctgttccactgtttttggcgttgctgcaacacgggtttcattggttaaccgttctcttggtatgccaattcgcatgatattcccttccatcggttttattgatgatggtttgcctgtgtcaggagccacacaagctgctcatgtacgagctaaatgttactccgttaaaataaattagtaacaaacgccctataacgtactgaaaattatgcctgtgatctagcgccaaaaatcagtatttcggcgtgaactcgcaaaatattaacgattcagccgtgatagtgggataaacaccttagaacgccggataaagactgataattgtcttcgacggtcgggtaaaacgagacatcgccccggcacgaatcactacttaacattaaattaacttatacaattcagttgcttcagtagtaatgatgctgatacggctgttttttaagcatagacggtcatttgagcaggattaaaattggcttaaggaatgtgatatgaaaaatgacgcagacagttacaccgtttaaatgcaataatcagccacgtttctcgttaataacaataccagtacctggtttgcgcaaggcgaaggattatttttatgaagcttaagaacaccctcctggcgagcgcactgctttctgctatggcattctccgttaacgcagcaacagaactgacaccggagcaagcggcagcggttaaaccttttgaccgtatagtggttaccggtcgttttaatgctattggcgaagcggtgaaagccgtttctcgtcgcgcagataaagaaggtgccgcctctttttatgttgtcgacacttctgattttggtaacagcggtaactggcgtgtggtcgctgacctctataaagccgatgctgaaaaagcagaagaaacaagtaatcgcgtaattaacggtgttgtcgaactgccgaaagatcaggctgttctgattgaaccgtttgacacggtcaccgtccagggcttctatcgtagccagccagaagtcaatgatgccatcaccaaagcggcaaaagcgaaaggtgcctactctttctacatcgttcgtcaaatcgatgccaaccagggcggcaaccagcgtattactgcattcatctataaaaaagatgctaagaaacgtatcgtccagagcccggatgtgatcccggcagattccgaagcaggacgtgcagctctggctgccggtggcgaagccgcgaagaaagttgagatcccgggtgttgcgactaccgcaagtccaagttctgaagtcggtcgcttctttgaaacccagagtagtaaaggcgggcgttacaccgtcacgctcccggatggcactaaagtcgaagaactgaacaaagcgaccgcagcgatgatggtcccgttcgacagcatcaaattctctggcaactacggcaacatgaccgaagtctcctatcaggttgcgaaacgtgccgcgaagaaaggtgctaagtattaccacatcacccgccagtggcaggaacgtggtaataacctgaccgtcagcgcagatctgtataaataactattcagttactcctataaggcggcttgatgccgcctttcgcatttttagtcacaaatttccccgcgaccattgcatgcagacacatctcttcgtaaaatcccgcgcttcagtggcaaactccatttttatgcgttttgccctaatatttattcttcttatcacgttttaatcactggatatcgatggaaaagaaactgggactgagcgcactcaccgcgctggtattaagcagtatgctgggcgcgggtgttttcagtctgccgcaaaatatggcggcagttgccagcccggcagcactgctcatcggctggggtattactggcgctggcattttattgctggcctttgccatgctgatcctcacgcgcattcgtcccgaacttgacggcggtatctttacctatgcccgcgaagggtttggcgagctaatcggcttttgttccgcatggggatactggctgtgcgcagtcatcgccaacgtctcctatctggtgatcgttttttccgcgttaagcttttttacggacacgccggaattgcgcctgtttggcgatggtaatacctggcaaagcatagtcggtgcaagcgctttattgtggattgttcactttttgatcctgcgcggggtgcaaaccgctgccagcattaacctggtggcgacactggcaaaattgttgccgctgggtctgtttgttgtgctggcgatgatgatgttcaaactggataccttcaagctcgacttcaccggacttgcacttggcgtacccgtttgggaacaggtgaaaaacaccatgctgatcaccctgtgggttttcattggtgtggaaggtgccgtggttgtttctgcgcgtgcgcgtaataaacgtgatgttggcaaagcgacactgctggcggttctctccgctctgggcgtttacttgctggtaacgctgcttagcctgggtgtggtggcacgtcctgaactggctgaaattcgtaacccgagtatggccggtctgatggtggaaatgatgggaccatggggcgaaatcatcatcgctgccggtttgatcgtttccgtttgcggcgcgtacttaagctggaccatcatggcagcagaagtaccgttcctggccgccactcataaagcattcccgcgcatttttgcgcgccagaacgcacaagctgcgccatccgccagtctgtggttgaccaacatctgcgtgcaaatttgtctggtactcatctggctgaccggttccgattacaacacgttgctgaccatcgccagtgaaatgattctggtgccctatttcctggtcggcgcgttcttgctgaaaatcgcaacccgtccactgcataaagcggtaggtgtcggtgcctgcatttatggcttatggttattgtacgcctctggtccaatgcacttgctgttatccgttgttctgtatgcaccggggctgctggttttcctgtacgcgcgcaaaacgcatacccatgataatgtactgaaccgtcaggaaatggtgctgattggcatgctgttaattgccagtgttccggcgacctggatgctggtgggataacgttcatcccatcgttggatagcaaaggagataacgatgggtaaaacccagcccttgccaatattaattactggcggaggtcgtcgcatcggcctcgccctcgcatggcatttcattaatcaaaagcaaccggtgattgtcagctatcggacacactatccagccattgatggactgattaatgcaggtgcgcagtgtattcaggctgattttagcaccaacgacggtgtgatggcgtttgccgatgaagtactaaaaagcacccatggtctgcgtgctattttgcataacgccagtgcgtggatggcggaaaaaccgggtgcgccactggccgacgtactggcttgcatgatgcagatccacgttaataccccatacctgctcaaccatgcgctggaaagattactgcgtgggcacggacacgccgccagcgatatcattcactttaccgattatgtggtggagcgcggtagcgacaaacatattgcgtatgctgcaagcaaagcggcactggataatatgacccgcagctttgcccgcaagctggcaccggaagtgaaagtgaattctattgcgccaagcctgatcctgtttaatgaacatgatgatgccgaatatcgacaacaggcgctgaataaaagtctgatgaaaaccgcgcctggcgagaaagaagtgatcgacctggtcgattacttacttaccagttgctttgtcaccggacgcagtttcccacttgatggcggtcgtcatctgcgttaatgcagctttatccagcatataatcaacacccatgcgcttatcccccaacacgcaacagaaccaacaaaagcggcgggcaagcgcatcattccggtgaaataccacaggctcaccaggtaaacaaaatagggaataatgctccacatactaaaaatgatggttgcgcgtaaggcttcaatgccgcgttcgctggcaacaatataatgcgcgataagcgcaaaggtcgggaaaagtggaatcagcccggcgatataataatttttcgtttttgctaaaacaccaatcaacagcactaccagcgcaccgagcgcggctttgattaccagccccatctttttaccttaacacttccataacaagtcatcagtagaatacctgatgaaaacttgtttagaaacgattgatagtaagtaaaaacagcgcggtgtattgtgacgtttttatatctaccgtgaatgttatgaacactatcgtatttgtggaagatgatgcggaagtcggtagtctgattgccgcgtacctggcaaaacatgatatgcaggttaccgtagagccgcgcggcgaccaggccgaagaaaccattttgcgagaaaatccggatttggtgttactcgacatcatgctaccaggcaaggacggcatgaccatttgtcgtgatttacgcgcaaagtggtctggaccgattgttcttctaacctctctcgatagcgatatgaaccacatcctggcactggaaatgggtgcctgcgactatattctcaaaacgacgccccctgctgttttgctagcgcgtttacgtttgcatttgcgtcagaatgagcaagccacactgaccaaaggtcttcaggaaacgtctctgactccctacaaagccctgcatttcggcacgttgaccatcgatcccatcaaccgcgtagtcaccctggctaacactgaaatcagcctcagcacagctgatttcgaattattgtgggaattagctacccatgccgggcaaatcatggaccgcgatgcattgctgaaaaatttacgcggcgtcagttatgacggactggatcgtagcgtggacgtggctattagccggttaagaaaaaaactgctcgataacgccgcagaaccttatcgcattaaaactgtgcgtaacaaaggctatctttttgcgcctcatgcatgggaataagcgatgaaaaaactgtttatccagttttacctgttattgtttgtctgcttccttgtgatgtctctgctggttgggctggtgtacaaatttaccgccgaacgcgcgggcaaacagagcctggatgatttgatgaacagtagcctgtatctgatgcgcagcgaattgcgtgagatccccccacacgactggggtaaaactctgaaagagatggatttaaatctctctttcgatctgcgtgtcgagccactgagtaaataccatcttgatgatatttccatgcaccgactgcgtggcggcgaaattgtcgccctggacgatcagtacacgtttttgcagcgtatcccgcgcagccactacgtgctggcagttggtcctgttccttatctttattatctccatcagatgcgattgctggatatcgccctgatcgcttttattgctatttccctcgcctttccggtgtttatctggatgcgtccgcactggcaggatatgttaaaactggaagcagcggcgcaacgatttggcgatgggcatctcaatgaacgtatccactttgatgagggtagcagctttgaacgacttggcgtcgcatttaaccagatggcggacaatatcaacgccttaattgccagcaaaaaacagcttattgacggtatcgctcacgaactgcgaacaccgttagtgcgcctgcgttatcgactggagatgagcgataacctgagcgccgccgaatcccaggcgttgaatcgtgatatcagtcaacttgaagctttaattgaagagctgctgacttatgcccgactcgatcgcccacaaaacgagcttcatcttagcgaaccagacctgccgttgtggctgagtacgcatctggcagatattcaggcagtaacgcccgataaaacggtacggataaaaacgctcgtgcaaggccattatgcggcgttggatatgcgcttaatggagcgcgtgctggataatttgctcaataacgccctgcggtactgccatagtacggttgaaaccagcctgctactgagcgggaatagagcgacattaattgttgaggatgatggcccagggattgccccagaaaaccgcgaacatatctttgaaccttttgttcgcctcgatcccagccgggatcgcagtaccggcggctgcgggctggggctggcaattgtccactctatagcactggcaatgggcggtacggttaattgtgacaccagcgaactgggtggtgcccgcttcagctttagctggccgttatggcataacatcccgcaatttacctctgcctgacactacgcgcacgatggtcaagtcaccacgactgtgctataaaataagtatgttgtaactaaagtggttaatattatggcgcgttacgatctcgtagaccgactcaacactacctttcgccagatggaacaagagctggccatatttgccgctcatcttgagcaacacaagctattggttgcccgcgtgttctctttgccggaggtaaaaaaagaggatgagcataatccgcttaatcgtattgaggtaaaacaacatctcggcaacgacgcgcagagcctggcgttgcgtcatttccgccatttatttattcaacaacagtccgaaaatcgcagcagcaaggccgctgtccgtctgcctggcgtgttgtgttaccaggtcgataaccttagccaagcagcgttggtcagtcatattcagcacatcaataaactcaagaccacgttcgagcatatcgtcacggttgaaagtgaactccccaccgcggcacgttttgaatgggtgcatcgtcatttgccggggctgatcacccttaatgcttaccgcacgctcaccgttctgcacgaccccgccactttacgctttggttgggctaataaacatatcattaagaatttacatcgtgatgaagtcctggcacagctggaaaaaagcctgaaaagtccacgcagtgtcgcaccgtggacgcgcgaggagtggcaaagaaaactggagcgagagtatcaggatatcgctgccctgccacagaacgcgaagttaaaaatcaaacgtccggtgaaggtgcagccgattgcccgcgtctggtacaaaggagatcaaaaacaagtccaacacgcctgccctacaccactgattgcactgattaatcgggataatggcgcgggcgtgccggacgttggtgagttgttaaattacgatgccgacaatgtgcagcaccgttataaacctcaggcgcagccgcttcgtttgatcattccacggctgcacctgtatgttgcagattaacgcccggctttcatactgccgaccatctgttctggccgtacccagctgtcaaactcggcttcgctaagataccccagcgcaagggccgcagcttttaaggtcagcccttctttatgcgcttttttggcgatctcggcggctttgtcataaccaatgtgggtgttaagcgcagtcaccagcatcaggctttcattgagtaattgattgattcgctcacgattcggttcaatacccactgcgcagtgtttgttaaaactttccatgccatctgccagcaagcgcacgctttgcaggaaattgtggatcaccattggacggaagacgttcagttcaaagttaccggaagcgccccccatgttgatcgccacgtcgttccccatcacctgacagcagagcatggttaatgcctcacactgtgttgggttcactttccccggcatgatactgctgcccggctcattttccgggatactgatttcaccaattccgcagcgcgggccagaggccagccagcggacatcattggcgattttcatcagactcgcagccaaccctttcaacgcgccgtgcgcctgaaccagggcatcacaggtcgccagcgcttcaaatttgttcggcgcggtaacaaacggtgcacaggtaatgactgccagttcatctgctacgcgacgcgcatactccggatgggtatttagtccagtacccaccgctgtaccgccaagagccagttccgctacgtgaggcaggctgtattcgatatgtttgagattatgctcgagcatcgctacccagccggaaatctcctgccccagcgttaacggcgtggcatcctgcaagtgagtacgaccaattttgacgatatcggcaaaagcacgggatttctcattcagtgtctgtgtcagggttttaagctgaggaatgagttgcttgcgcagcgccagcagcgccgcaacgtgcatcgccgtcggaaagacatcgttggaactttggcttttgttcacgtcgtcgttagggtgaactttacgttccatcccgcgcacaccgccgagtaattcactggcccggttagccagcacttcgttcatgttcatgttactttgcgtgccggagccggtctgccagatagccagcgggaattcgtcgtcatgctgtcctgccagtacttcatccgccgcctgacgaatggcgctcgctttctcttcagacaacaagcctaaatcttcattaacttttgccgctgcacgcttggttagcgccagcgcatgaatcagactggtgggcattttctccgtgctaatgcggaaatgctccaggctgcgttgagtttgtgcgccccacagcttatctgccgggacatcaatcgcccccatgctatctttttcgctgcgtactgtattcatgacctgctcctcacctgattaattttttctttctgttttgctttcgttaagcaacttttagctcacttattatttaccatttgataacaaatgtttggtctttcgtgccatgtaaaaaaaccgccccgaagggcggctctgtttatttcacacagcgggtgcattgtgtgagttgtatctgctggaagaagtcatttcctttatcatccacaaggataaacgccgggaaatcttccacttcaattttccagatggcttccattcccagttccggatattcaacacattccaggctcttaatacttccctgcgccaatacagcggccggaccaccgatactgccaaggtagaagccgccgtgttttttacaggcatccgtcacctgctggctgcggttgcctttcgccagcatgatcatacttccgccctgcgcttgcagttgatcgacataagaatccatccgtccggcggtcgttgggccaagagaaccggaggcataaccttccggcgttttggccggacccgcgtagtaaatcggatgatctttgatgtactgcggcagcccttcaccgttatccatccgctctttcagtttggcgtgagcaatatcacgaccgacgataatcgtgccgttaaggcttaagcgtgtagaaacgggatactggctcaactgtgcgaggatctctttcatcggacggttaaggtcaacgcgcaccgcttcgccttctcccgctttgcgcagctcttccgggatatatttgcctggattatgttccagtttttcgatccagatcccctgacggttgatcttcgctttgatattacggtcagcagagcaggagacgcccataccgaccgggcaggatgcgccgtgacgtggcaggcgaatcacgcggatgtcgtgagcgaagtatttaccaccaaactgcgcacccagaccaagattttgcgcttcgatcagcaattctttttccagttccacatcgcggaacgcctgaccgtgctcattcccttccgttggcagttcatcatagtatttcgcggaagccagtttcaccgttttaaggttcgtttctgcagaagttccaccaataacgaacgcaatatgatacggaggacaggccgccgtacccagcgtgcgcatcttctcaaccaggtaatttttcagtttccccggcgtcagtaacgctttggtttcctgatagagatacgtcttgtttgcgctaccaccacctttggcgatacagaggaatttgtattcgtcgccatcaacggcataaagatcgatctgcgctggcagattggtgccggtattcacttctttatacatatccagcggcgcgttttggctgtagcgcagattatcttcgatataagtgttatagacaccgcgcgccagcgccgcttcatcaccaccaccggtccatacacgctgcccttttttaccaacaataatcgcggtgccggtatcctgacaggttggcagaacgcctttcgccgcgatgtcggagttacgcaggaattgcagcgccacatatttatcattttcgctggcctccgggtcacgcagaatgtcggccacctgttgttggtgcgccggacgcagcatgaagctcgcatcatgaaacgcctggcgcgccaacagagttaacgcttcgggtgcgactttcaaaatctcctgcccttcaaattcagatacgctaacgtgttcgctggttagcaggtaatactcagtatcatcttttttgagtggaaaaggagcctgataatgaaagggtttgttactcattgttctctcacttactgcctggtttggttatgctctgggcgggtgttccgttgccctgttaaaagcgagtaacaatatcctacacacttttttaacaaaaactgagactagtacgactttttgcggctccaggttacttcccgtaggattcttgctttaatagtgggattaatttccacattaaaacagggattgatcatgcaaaaactcattaacagtgtgcaaaactatgcctggggcagcaaaacggcgttgactgaactttatggtatggaaaatccgtccagccagccgatggccgagctgtggatgggcgcacatccgaaaagcagtagtcgagtgcagaatgccgccggagatatcgttagtctgcgtgatgtgattgagagtgataaaagcactctgctcggagaggccgttgccaaacgctttggcgaactgcctttcctgttcaaagtattatgcgcagcacagccactctccattcaggttcatccaaacaaacacaattctgaaatcggttttgccaaagaaaatgccgcaggtatcccgatggatgccgccgagcgtaactataaagatcctaaccacaagccggagctggtttttgcgctgacgcctttccttgcgatgaacgcgtttcgtgaattttccgagattgtctccctactccagccggtcgcaggtgcacatccggcgattgctcactttttacaacagcctgatgccgaacgtttaagcgaactgttcgccagcctgttgaatatgcagggtgaagaaaaatcccgcgcgctggcgattttaaaaagcgccctcgatagccagcagggtgaaccgtggcaaacgattcgtttaatttctgaattttacccggaagacagcggtctgttctccccgctattgctgaatgtggtgaaattgaaccctggcgaagcgatgttcctgttcgctgaaacaccgcacgcttacctgcaaggcgtggcgctggaagtgatggcaaactccgataacgtgctgcgtgcgggtctgacgcctaaatacattgatattccggaactggttgccaatgtgaaattcgaagccaaaccggctaaccagttgttgacccagccggtgaaacaaggtgcagaactggacttcccgattccagtggatgattttgccttcagcctgcatgaccttagtgataaagaaaccaccattagccagcagagtgccgccattttgttctgcgtcgaaggcgatgcaacgttgtggaaaggttctcagcagttacagcttaaaccgggtgaaagtgcgtttattgccgccaacgaaagtccggtgactgtcaaaggccacggccgtttagcgcgtgtttacaacaagctgtaagagcttactgaaaaaattaacatctcttgctaagcttattaaaggcttataacaccttcaggcggccagtccgcctgatttcattttatggataatcattatgaataaaagcctggtagcggtaggcgtcattgttgcgctaggcgtagtctggacaggcggcgcatggtatacaggcaagaagattgaaacccatctcgaagacatggtcgcgcaggcgaacgcgcaactcaaactgacagctcctgaatccaacctggaagtgagttatcaaaactatcatcgcggcgtattcagcagccagttgcaactgttggtgaaacccattgccgggaaagaaaatccgtggattaaaagcggtcagagcgtcatcttcaacgaaagcgttgatcatggtcccttcccgcttgcccagcttaaaaaactgaacctgatcccgagcatggcaagtattcaaaccacgctggttaataacgaagtaagcaaaccactgtttgatatggcaaaaggtgaaacgccttttgagattaacagccgcattggttacagcggtgattccagttccgatattagcctcaagccactgaattacgagcaaaaggatgaaaaagtcgcctttagcggcggcgagttccagttaaatgctgacagagacggcaaagccatctccctttccggggaggcgcaaagtggtcggatagacgcagttaacgaatacaaccagaaagtgcagttgacctttaataatctgaaaaccgacggttccagcacgctggcaagttttggtgagcgtgtaggaaatcaaaaactgagtctggaaaaaatgaccattagtgtggaaggcaaagaactggcactgctggaaggcatggagatcagcggtaaaagcgatctggtcaatgacggtaaaacgatcaatagccaactggattacagcctaaacagcctgaaggtacagaatcaggatctgggcagcggcaagctgactttaaaagtcggccagattgatggtgaagcctggcatcagtttagccagcaatataacgcgcaaactcaggcgctgctggcacagccagaaattgccaacaaccccgaactttatcaggagaaagtgacggaagccttctttagcgccctgccgctgatgctgaaaggcgatccggtgattactatcgcgccgctaagctggaaaaacagtcagggtgaaagtgccctgaatctgagcctgttcctgaaagatccggcaacgactaaagaagcgccgcaaacgctggcgcaggaagtagatcgtagcgttaaatctctggatgcgaaactgaccattccggtggatatggcaactgagtttatgactcaggtagcgaagctggaaggttatcaggaagatcaagcgaaaaaactggcgaaacagcaagttgaaggtgcaagtgcaatggggcagatgttccgtctgaccaccttgcaggacaataccatcaccaccagcctgcaatatgctaacggtcagataacgttaaatgggcagaaaatgagcttagaagattttgttggcatgtttgcgatgccagctcttaacgttccggctgtaccggcaattccgcagcagtaattcacggccaaaacgccggagaattttcactccggcgttttcatctgaaaacaaaccagagattgcctgatgcgctacgcttatcaggcctaccttttcctgcaacactttgaatttatgagtttttgtaggctggataaggcgtttacgccgcatccggcataaaaaacgcgcactttgtcaacaatctgaaacgccggagatttttctctccggcgttattttttacttcagcataaagtcatactgaatactcattttcacatcccagtaattcaggcgatcgcccagcgtactgccatcgcgcttttcccgccctttatcggcagcaagaaagaaattcatcccttgtaacggcccttcgctgacccgatagttcataccacctaagatacccgtgccttcaatccgcacatctcgtttactggattcatagccgcgagtcacaatcggtgcaaatgtcagcgtaaattgcggcgttaaacgatagttgacgcccaattgccaggactgcattccttcacggttacgatcaagacttaaactaaagggatagccaatgtcggtatccaccacggcaccattcattgcatggcgcaaataaccaccactgccaaatacacttccccacggcgcattccaggtcaattgtccactaaccaacgccgtttcattgggctggctggtattacgacttaaaccttcgagctgcgcgtaaaagccgagcaactcccctttcaacgtataattcgggtcgagcggtatgcttttctcgagaatactttgtatctgattggaaacatctttctgtacgcttgcccccagagaatagcgactggtatcatcatgccaactggcggctaaaaaagaacgtgcgcgatgtttatcgtattttcccgtctggctgttatacaccccttcatcacgaataccggttgtactatcagtccataaaaatactcgactacgccacattccccacagatcaatatttggtgttaaagcccaataacctaatgctccttcagaaactgtcggtaatgtacgttggctactgccagccattaacggaatacgataaggtaagctaccataactataatccgtcccgaagcgacctaatttaagcaggctattttcactgggttttatttttactgcccccagggcaaagccaaaacttttatcaccatcaagataccaccgggtactcatatcagcacgagcacctaatttataaacataatacgccccgccttcaacgccaataatattggaataataaccactattgaaatcgagcaatcctccctgtacccatgcgtaaatatctcttcccgcgccagcactgggcttatccgccctgcgcaattcgtttttcagtctgatgcgtagtcccgcttcatcgtcagccagttgcgccgcataagcagaggtaaggccagaggcagccgtcaggcaaataacggccatggccactatttttctcatagttgcacctttgatgttctgattatttttattgaatattaattagtgatatcgctgattaattgctgctgcacttttttacgattatcaatttcaaccacgatttctttgaattttttatccgtgagcggataaaaccagataataacgaatgccagtagcataaatccgcaaggtactaaggcaatacttgtgcggatgcccataataacttccggcgtttgcacctgattggcgatatatccgcttaaccccaaaataaaggcaggaatactacctccgattgcctgaccgcatttacgggtaaaactgaatagactataggtgagcccttcaattcgcacgccggtcaggtattcaccgtattctacggtatcagcttccagcgcccacatcacggtcatggtaacgccctgaccaatactagcgatggccaacgcaaccaacgccaccggcagactccagacggaaacccagaagaacagcagataaccgcaggttcccagcaaagcgccaatcaggaaggtattctttttaccgatcctcgcgaccatccccggcaccagcggtgcgcttgccacagtaccaaccaggttttgcaccagtaccagcacagtgaacagcccggtatcatttaacacatagcgcacgtagaacaagctgctggcgctgaccgcaaaggtgctaatcagcacacacagcgcaccgatgcacaacataaacagcgggcgattccgtttcagggtttgcagactgatattcaaactcggctgcgcaacgatacgtaccacattctcacgcgtgcttttgaagcagatgaagtaaagcaccattccggcaatcgccagcacaattgtccagaaatggtatacgctcaccatctcttccgggctggagttcttaatgctcggtcctatcagaaatgccaggcagacaaaggtcaaactagcggcaatcccacgagccgcgcccagacgggcgcgggattgtggttgttgggtcatcgcggtagcaagactaccataaggaatattcaccaggctgtagcaaagcccgaggcccatgtaggtcaaatatgcatacaccactttgctaccatggctccagtcggtcagcacccagaataccagcacgctgaagatcattaacggcgcagtaccgaagagtaaaaacgggcggaattttccccagcgggtattcacactgtccaccactcgtccggcaaagacgtcggcgaaggcatcgaatacccgcaccagtaacagcatggtgcccgccgcagcggcaccgacgccagcgacgtcggtgtagtaactcaacaggaagagcgcccccattgcgaaggcgaagttattggcgacgtcaccgaggctgtagccgacgatggtgcgccaggagagttgttgattcattgtttgcctccctgctgcggtttttcaccgaagttcatgccagtccagcgtttttgcagcagaaaagccgcgctcttcggtttgcggtcgcgagtgaagatccctttcttgttaccgccaacgcgcaatatgccttggctggtcgcaaaatcggcgaaattccatacctgttcaccgacgacggcgctgacgcgatcaaagacgcggtgatacatatccagccatgcacactgatactcttcactccacatgtcggtgtacatactgtgcagcccggctaacgtatccacgccgtattcggtgatgataatcggctgatgcagtttctcctgccaggccagaagttctttttccagtaccttctctgccgtttccaaatcgccgctttggacataccatccgtaataacggttcaggcacagcacatcaaagagatcgctgatggtatcggtgtgagcgtcgcagaacattacattgacgcaggtgatcggacgcgtcgggtcgagtttacgcgttgcttccgccagtggcgcgaaatattcccgtgcaccttgcggacgggtatccggttcgttggcaatactccacatcaccacgcttgggtggtttttgtcacgcgctatcagctctttaatcgcctgtaagtgcgcttgctgagtttccccgttgactgcctcttcgctgtacagttctttcggcttgttgcccgcttcgaaaccaatgcctaaagagaggttaaagccgacagcagcagtttcatcaatcaccacgatgccatgttcatctgcccagtcgagcatctcttcagcgtaagggtaatggctggtacggtaggagttggccccaatccagtccattaatgcgtggtcgtgcaccatcagcacgttatcgaatcctttgccacgcaagtccgcatcttcatgacgaccaaagccagtaaagtagaacggtttgtggttaatcaggaactgttcgcccttcactgccacactccggatgccgacgcgaagcgggtagatatcacactctgtctggcttttggctgtgacgcacagttcatagagataaccttcacccggttgccagaggtgcggattcaccacttgcaaagtcccgctagtgccttgtccagttgcaaccacctgttgatccgcatcacgcagttcaacgctgacatcaccattggccaccacctgccagtcaacagacgcgtggttacagtcttgcgcgacatgcgtcaccacggtgatatcgtccacccaggtgttcggcgtggtgtagagcattacgctgcgatggatcccggcatagttaaagaaatcatggaagtaagactgctttttcttgccgttttcgtcggtaatcaccattcccggcgggatagtctgccagttcagttcgttgttcacacaaacggtgatacgtacacttttcccggcaataacatacggcgtgacatcggcttcaaatggcgtatagccgccctgatgctccatcacttcctgattattgacccacactttgccgtaatgagtgaccgcatcgaaacgcagcacgatacgctggcctgcccaacctttcggtataaagacttcgcgctgataccagacgttgcccgcataattacgaatatctgcatcggcgaactgatcgttaaaactgcctggcacagcaattgcccggctttcttgtaacgcgctttcccaccaacgctgatcaattccacagttttcgcgatccagactgaatgcccacaggccgtcgagttttttgatttcacgggttggggtttctacaggacgtaacataagggactcctcattaagataataatactggtcaacctttaatctgattagttaaccaattctgtgttgcacacagttatctgtgagaaacccatggaagagaaatggaaataaaaagaactgacaccgcgatcaaaaaaccaaaaactgcaatacccacagcgtgatatagatcgcattaatctttaaaacagcgttgacagaagccataaaataagcaaccgaacgttcgttcgagcgtattgggaacgataaactctcatgacatatggctacagtgaatattttggggggaattctccgaagccgggaaggataatttttgcacagagaaattacgatatgaaacgcgggcacagttatcaccagcccgccgaaaaagagagagaatcaggatgcggttaagataccgccaatcatcgcgcgtaatccctgagcaaagctcgcttcacgcgccaggtcttccgcttcgatatcggccagtacaccgtaggtcagatccagcagtaaacgactagtcattgccgtgttgatgtctgggcttatctcgcctttttgctgggcatcacgcatccgctgggcaacaaattccgtgatcgtcatatgcttatttttaagcatggcggcgacctgtgggttacgcatcccttccgccataatttcaaccaccagcgcccgttgtccaaaggcttcatgggtgagagagacaatggactcgaccatatagtcaacgaaatgaatcccttcaatcggttcccggaaacgggccagcgccctctcctggtcctgtaagataatcgcctgaatcaaggcttctttggagatgaaatggtgatagagcgtcccgggactaatggcgcaagatttacagatggctttcatgctggcactgtgaaatccattttcactaaaaatctctctggcagcattgaggatccgggtccgtgtcggttgtgcttcagtctgcatgttatccatcattaaaccattatagttagcgtgaataactagtttaccgcgttgtcaggtgagcgcctatcattgctgttgaatagtgcgaaggcacactctattcgtatacttttcactctgaaattggttaaccaatagccgtgatttggctgccagttatttagcagagacgttgatgagtttatcccggtaaacaacacgcacggttgtttaccggtccgttagtgtattaattgagctcctgtaccccaccaccggagacggtgagaatttgtccgcttacccagctcgcagcagggctgcaaaggaacagcgctgcgttagcaatatcttgcggttggcccagacgtctgatcggcgtgtgctgtaacattttttgttcaatttctggtgtaataacggatttcagggcatcggttaatattgcccccggcgcaatgccatttacccgaatatttttttcacccaggtcaaacgccatatttctgaccagatgactggccgcagctttagaacttgcataggaagtcatgtttatatttttattttctgccgccatagaagtgatggtcagaataacgccaccgccatttttttccatttctggcgcaacaagttgactcagatggaaaaaagaaaacacattcagttcataagcacggcgaaaatccgccattggcatatcaaacggtttaggtccaccgccaccggcgttgttaaccagaatatcaactttacccagcttactgatagcaaagtctgccagtgcagagagttcctgttcggaagtaatatcacaacggcaggcaaatgcctgaccacccagttgttgaatttcgtctacaacatggttagctgcgtcggcgttaatatcactgaccaccacagatgcgccagctgtcgcgaatgtaatggcgatttctttaccaatacctgcacccgcacctgtgatgatggcgcattttccgtcgagtctcaggttgtcagaattaaacacataaacctcctgtgaacttcagtaaaaataaaaggcaccgcctgtgtgccacattttttatcattaaccttgaggaaaggacactaccaggtatagcagataaagagaggattatttcgctgcaatgagccgggcgggaataataagattgcgactatgcgtctcttcatgggtgattttttgcatcatgcgatccgcaagtgtgataccaagttcccgcgctggcgtgctggcccaggtaacaggtatatcatcaagtgtggttggtgtcgcatcggtaaatgccgccaggctaacctgttgctcaaagtaacgatcgactccgctttccccgctttgccgccctgctttgagcaaaccaaaccatgcccccatcgcaatagtttcgttatagcaaaccacggcactgatggtcgggttatgacgtaaaagcgccgtgatagcttccgcggcttgcttctggctggaagtgcactccaacacccaatcgctatgaaacggcaggccaaattttagtagagttgcacaatagcccccaacccgttctgcacgggttaaactggaactttgccctcccagccaggcgatccgctgatgcccattgcgaatgagatgctccgtcaacaactgtgcagcctgcatgttgtccgggcgaaccgtatcaacatcatcaagataactggcacgggaagcgaaaatcaccgggatagctttttcttctgccatccgtcgcaggtcatcgctacttcctgcagctccggcaattaccacaccatcgacaccctgattcagtaacagactaaaccgctgtgccagctgctcaccgtctttaccgccgtgaagcaaaaaaaccatccgtccctgcgcttccagagcttccgtcaatccggccgtcaattcggcgtaaaacggcgcagataaatcacggacgatcaaaccaatgacgccgctttgcccgccgcgcagcgcgctcgcctggcgattgcgcacaaatcccagctcttcaatggcggcgttaacgcgttctcctgtggcggtagagattcgccctttgccactaagcaccaggctaacggtacttacgctcacgcccgcagccagcgcaacatcatgaatggttatttttttggcggtagccatgcagatgacctactccctgattatgtgacagataaaacgttttaccttttatttatcttatacccgctattatcgttgcgtaatgtgatttatgcctcactaaaatttgataaaacgttttatcttctcgcgcaatttactgaatccagattgttctctacgaggagtcgttttatgacggcgaaaacagcaccgaaagtcacgctgtgggagttcttccagcagttaggcaaaaccttcatgttacccgtggcattattgagcttctgcggcattatgctcggcattggtagttctcttagcagccatgatgtcataaccctgatcccggtcctgggcaaccccgtgttgcaggctatctttacctggatgagtaagattggcagctttgcttttagtttcctgcctgtcatgttctgtatcgccatcccgctgggcctggcacgcgaaaataaaggcgtagcggcattcgctggcttcatcggttatgcggtaatgaacctcgcggtaaacttctggttgaccaataaaggcattctgccaaccacggatgccgcggttctgaaagccaataacatccagagcattcttgggatccagagcatcgataccgggatcctcggtgcggtgatcgccggtattatcgtctggatgctgcatgagcgtttccataatatccgcctgccggatgcgctggcattcttcggcggtacgcgcttcgtaccaattatctccagcctggtgatgggccttgtcggcctggtgattccattagtctggccgattttcgccatgggtattagcggcttgggccatatgataaacagcgcgggtgatttcggaccgatgctgtttggtaccggtgaacgtctgctgttgccgtttggtctgcatcacattctggtggcattaattcgctttaccgacgcaggcggcacgcaggaagtctgcggtcaaaccgtcagcggcgcactgaccatcttccaggcgcaattgagttgcccgaccactcacggtttttctgaaagcgccacgcgtttccttagccaaggtaaaatgcctgcgtttctcggcggtctgccaggtgcagcgttagctatgtatcactgcgcgcgcccggaaaatcgccataaaattaaaggtctgctgatttctggcctgatcgcctgcgtcgttggcggcactaccgaaccgctggaattcctgttcctgttcgtagcgccagttctgtatgtcatccacgcgctgttaaccggcctcggcttcaccgtcatgtctgtgctcggcgtcaccatcggtaataccgacggcaatatcatcgacttcgtggtgttcggtattttgcatggtctgagtaccaagtggtacatggtgccagtggtggcggcaatctggtttgtcgtttactacgtcatcttccgtttcgctatcacccgcttcaatctgaaaaccccggggcgcgatagcgaagttgccagcagtatcgaaaaagccgttgccggtgcgccgggtaaaagtggttacaacgttcctgcaatcctcgaagcattaggcggtgccgacaatattgtcagcctcgataactgcattacccgtctgcgtttgtctgtgaaagatatgagccttgttaatgtgcaggcactgaaggacaatcgggcaattggcgtagtacaacttaatcaacataacctgcaggttgttatcgggccacaagttcagagtgtaaaagatgaaatggccggtctgatgcatactgtccaggcataaggataagatatgttcgattttagtaaggtcgtggatcgtcatggcacatggtgtacacagtgggattatgtcgctgaccgtttcggcactgctgacctgttaccgttcacgattagtgacatggattttgccactgccccctgcattatcgaggcgctgaatcagcgcctgatgcacggcgtatttggctacagccgctggaaaaacgatgagtttctcgcggctattgcccactggttttccacccagcattacaccgccatcgattctcagacggtggtgtatggcccttctgtcatctatatggttagtaaactgattcgtcagtggtctgaaacaggtgaaggcgtggtgatccacacacccgcctatgacgcattttacaaggccattgaaggtaaccagcgcacagtaatgcccgttgctttagagaagcaggctgatggttggttttgcgatatgggcaagttggaagccgtgttggcgaaaccagaatgtaaaattatgctcctgtgtagcccacagaatcctaccgggaaagtgtggacgtgcgatgagctggagatcatggctgacctgtgcgagcgtcatggtgtgcgggttatttccgatgaaatccatatggatatggtttggggcgagcagccgcatattccctggagtaatgtggctcgcggagactgggcgttgctaacgagcggcagcaaaagtttcaatattcccgccctgaccggtgcttacgggattatagaaaatagcagtagccgcgatgcctatttaagcgcactgaaaggccgtgatgggctttcttcccctagcgtactggcgttaactgcccatatcgccgcctatcagcaaggcgcgccgtggctggatgccttacgcatctatctgaaagataacctgacgtatatcgcagataaaatgaacgccgcgtttcctgaactcaactggcagatcccacaatccacttatctggcatggcttgatttacgtccgttgaatattgacgacaacgcgttgcaaaaagcacttatcgaacaagaaaaagtcgcgatcatgccggggtatacctacggtgaagaaggtcgtggttttgtccgtctcaatgccggctgcccacgtagcaaactggaaaaaggtgtggctggattaattaacgccatccgcgctgttcgttaaccccaattgcgcaacgtaaaaaatcgttgcgcaatcgtggatttttaccctgctttgtttttataatggtgcgcacttttatatccagaaaaagagtgcgaccatgattgataccaccctgccattaactgatatccatcgccaccttgatggcaacattcgtccccagaccattcttgaacttggccgccagtataatatcagccttcctgcacaatccctggaaacactgattccccacgttcaggtcattgccaacgaacccgatctggtgagctttctgaccaaacttgactggggcgttaaagttctcgcctctcttgatgcctgtcgccgcgtggcatttgaaaacattgaagatgcagcccgtcacggcctgcactatgtcgagctgcgttttagtccaggctacatggcaatggcacatcagctgcctgtagcgggtgttgtcgaagcggtgatcgatggcgtacgtgaaggttgccgcacctttggtgtgcaggcgaagcttatcggcattatgagccggaccttcggcgaagccgcctgtcagcaagagctggaggcctttttagcccaccgtgaccagattaccgcacttgatttagccggtgatgaacttggtttcccgggaagtctgttcctttctcacttcaaccgcgcgcgtgatgcgggctggcatattaccgtccatgcaggcgaagctgccgggccggaaagcatctggcaggcgattcgtgaactgggtgcggagcgtattggacatggcgtaaaagccattgaagatcgggcgctgatggattttctcgccgagcaacaaattggtattgaatcctgtctgacctccaatattcagaccagcaccgtagcagagctggctgcacatccgctgaaaacgttccttgagcatggcattcgtgccagcattaacactgacgatcccggcgtacagggagtggatatcattcacgaatataccgttgccgcgccagctgctgggttatcccgcgagcaaatccgccaggcacagattaatggtctggaaatggctttcctcagcgctgaggaaaaacgcgcactgcgagaaaaagtcgccgcgaagtaacaaaatggatggtgcaaatgcaccatccatttttcatgcaaggcacaaagtcgcgcgatgtttggcggattcgatgcccagctcaatcaactccattacctggattgcctggcttgccggaaccggattttcaccatcgccatttaacgcatcacgaatagccgcatagtaagccggataattcccaggcaccgtcaacagcgtttcttcgacacgttcctcaccttccacgcgggtaagtacgccatcacgcatatcgtagccccagtcttcctgcggtagacgctcgccatttttcagacgttcttcctgtggatcgaggccatatttcacataactgcctcgggatccatgcacgatataccgtgcactctcagcggctgccagcatggtaccgtgtaaaatgactcgccgctgtggataggacaagatggcgtggaaataatcggtgctctgcgctccgggccgtaactgtgccaaatctaccgtcatgctgaccggtaaaccaaaaagcgtaatggcctgatcaagaagatgtggtgctaaatcgtaccagataccgctgcctgggccgccctgttcacgccaacgatcgcgcacctgcggacggaagcggtcaaaatgagactcaaagtaagcaacttcacccagcacgccttccgcgagtaaaccttttagcgtcaagaaatcgctatcccagcgacggttatggaatacagacagcacacgccccaggctttttgccagcgcatccagctctcgcgcttgactcagtgtcacggtaaagggtttatcaacgaccacatgtttacccgcctcaagcgccgctttggctaacgggaaatgggtatcgttgggtgtaggaatgacaatcaggtctatgttgggatcgttaaacagatgcttcggctcagagacaaccgtaaccgttggccagtcggcttttacttttgtttcatcactgctggagattaccgccagttcctgcccgggcgtgcccgcaatcaggggcgcatggaaggttttgctcgcataaccatacccaatcaacccaacacggatgttgtcgctcatgtcattgcctctcattgaagtatgatggctatttgacactatcctttacccacgctcaacagtttaataacctgccagcaataagggatgttgtttaacttaagtcaaaaaaatagcgaattttccaacgacaaaagctaaatatcgcaaaaacctcagtaaaaatcttgctggagctattattgctaagtaacatttaccccctgaagttaatggatcaatcaagagagatgtgggctgtaatgaatcgtcttattgaattaacaggttggatcgttcttgtcgttagtgtcattcttcttggcgtggcgagtcacattgacaactatcagccacctgaacagagtgctagcgtacaacacaagtaagctctgcacttgtggagcgacatgctgcccgtccgggtgcatgttttcacttgtcggatattaaaccaggaatttattatcttgttcgatgttgttggtgattgtcagggatagtaaagcgcgttactcttttcagagcagtttttcatccctgaatatttgccatcagcgcattcttattattgtaataacacaagcgttcacttttggtgaaattttatcatcactaataatacctacccctttggtattaattattttatggaccttttatgactgttcaggactacttattaaaatttcgcaaaatcagtagtctcgaaagtctggaaaaactctacgaccatcttaattacaccctgacggacgatcaggaactgatcaatatgtatcgtgctgccgatcaccgtcgcgcagagctggtttctggcgggcgtttgtttgacctcggccaggtaccgaagtccgtctggcactatgtccaataaagaaagtagcgatcggttataaaagccttataataacgcccctaaaattagatttgcctgtttgcgtcgctattctggagaacctatgaccaccacaacgccacaacgtattggaggctggttgcttggcccgttggcctggcttttagtcgctctgttgagtacgacgctggcgttgttgctgtataccgctgcgttatcttctccgcaaacatttcaaacgctcggcggacaagcactgacgacacaaatcttatggggcgtttcttttattaccgctatcgccttgtggtattacacactgtggttgaccatcgctttctttaaacgtcggcgttgtgttcctaaacactatattatctggctgcttatttccgtattgctggcagtaaaagcattcgcttttagtcccgtggaagatggcatagccgttcgccagttgctgtttactttgttggcaaccgcattgatcgtcccctatttcaaacgcagcagccgggtaaaagcgacgtttgtgaatccgtaataaccttacagttaacctgttgtcgcctgctctggattaacggataataggcggcttttttatttcaggccgaaaaatgactgactacctgttactgtttgtcggaactgtactggtcaataactttgtactggtcaagtttctcggtctctgtccgtttatgggggtttccaaaaaactggaaaccgcgatgggcatggggctggcaacaacgtttgtgatgacgctggcgtctatttgcgcctggcttatcgatacgtggattttgatcccacttaatctgatttacctgcgcaccctggcatttattctggtgattgctgtggtcgtgcagttcaccgagatggtggtgcgcaaaaccagcccggtgctttaccgtctgctggggatttttttgccgcttatcaccaccaactgtgcagtgctcggcgtggcgttgctgaatatcaatctcgggcacaatttcttgcagagcgcgctgtacggtttttccgccgctgtcggtttcagcctggtgatggtgctcttcgccgccatccgcgaacgccttgctgtggctgatgtcccggcaccttttcgcggtaatgccattgcgttaattaccgcaggtcttatgtctctggcctttatgggctttagtggtttggtgaagttgtaatgaatgctatctggattgccgttgccgccgtgagcctgctgggcctggcgtttggcgccattctgggttatgcctcccgccgttttgcggtggaagacgatccggtcgttgagaaaattgacgaaatcttaccgcagagccagtgtggtcagtgcggttatcccggctgtcgcccctacgcggaagccatcagctgtaacggtgaaaaaatcaaccgttgcgccccaggtggcgaagctgtgatgctaaaaattgccgagttgcttaatgtcgagccgcagccgctggatggcgaagcgcaagagataacgcctgcgcggatggtggcggttattgatgaaaataactgtattggctgcactaaatgtattcaggcgtgtccggtagacgccatcgttggcgctacccgtgccatgcatacggtaatgagtgatctctgtacgggctgcaatttatgtgttgatccgtgcccgacgcactgcatcagcttgcaaccggtcgcagaaacacctgactcctggaaatgggatctgaacaccattcccgtgcgtatcattcccgtggaacaccatgcttaagttattctctgcattcagaaaaaataaaatctgggatttcaacggcggcatccatccaccggagatgaaaacccagtccaacggtacacccctgcgccaggtacccctggcgcagcgttttgttattccactgaaacagcatattggcgctgaaggtgagttgtgcgttagcgtcggcgataaagtattgcgcggccagccgcttacccgtggtcgcggcaaaatgctgcctgttcacgcgcccaccagcggtaccgttacggctattgcgccccactctacggctcatcctagtgctttagctgaattaagcgtgattattgatgccgatggtgaagactgctggatcccgcgcgacggctgggccgattatcgcactcgcagtcgcgaagagttaatcgagcgcatacatcagtttggtgttgccgggctgggcggtgcaggattcccgacaggcgttaaattgcagggtggcggagataagattgaaacgttgattatcaacgcggctgagtgcgagccgtacattaccgccgatgaccgtttgatgcaggattgcgcggctcaggtcgtagagggtattcgcattcttgcgcatattctgcagccacgcgaaattcttatcggcattgaagataacaaaccgcaggcgatttccatgctgcgcgcggtgctggcggactctaacgatatttctctgcgggtgattccaaccaaatatccttctggcggtgctaaacaattaacctacattctgaccgggaagcaggttccacatggcgggcgtagttccgatatcggcgtattaatgcaaaacgtcggcactgcttatgcagtgaaacgtgccgttattgatggcgagccgattaccgagcgtgttgtaaccctgactggcgaagcaatcgctcgcccgggcaacgtctgggcacggctggggacgccagtgcgtcatttattgaatgatgccggattctgcccctctgccgatcaaatggtgattatgggtggcccgctaatgggctttaccttgccatggctggatgtcccggtcgtaaagattaccaactgtctgttggctccctctgccaatgaacttggcgaaccacaggaagaacaaagctgcatccggtgtagcgcctgtgctgacgcctgccctgcggatcttttgccgcaacagttgtactggttcagcaaaggtcagcaacacgataaagctaccacgcataacattgctgattgcattgaatgtggggcttgcgcgtgggtttgcccgagcaatattcccctggtgcaatatttccgtcaggaaaaagctgaaattgcggctattcgtcaggaagaaaagcgcgccgcagaagccaaagcgcgtttcgaagcgcgccaggctcgtctggagcgcgaaaaagcggctcgccttgaacgacataagagcgcagccgttcaacctgcagccaaagataaagatgcgattgctgccgctctggcgcgggtgaaagagaaacaggcccaggctacacagcctattgtgattaaagcgggcgaacgcccggataacagtgcaattattgcagcacgggaagcccgtaaagcgcaagccagagcgaaacaggcagaactgcagcaaactaacgacgcagcaaccgttgctgatccacgtaaaactgccgttgaagcagctatcgcccgcgccaaagcgcgcaagctggaacagcaacaggctaatgcggaaccagaacaacaggtcgatccgcgcaaagccgccgtcgaagccgctattgcccgtgccaaagcgcgcaagctggaacagcaacaggctaatgcggaaccagaagaacaggtcgatccgcgcaaagccgccgtcgaagccgctattgcccgtgccaaagcacgcaagctggaacagcaacaggctaatgccgagccagaacaacaggtcgatccgcgcaaagccgccgtcgaagccgctattgcccgagccaaagcgcgcaaacgggaacagcaaccggctaatgcggagccagaagaacaggttgatccgcgcaaagctgccgtcgaagcggctattgcacgcgccaaagcacgcaagctggaacagcaacaggctaatgcggtaccagaagaacaggttgatccgcgcaaagcggcagttgccgcggctattgcccgcgctcaggccaaaaaagccgcccagcagaaggttgtaaacgaggactaaatggtattcagaatagctagctccccttatacccataaccagcgccagacaagccgcattatgctgttggtgttgctcgcagccgtgccaggaatcgcagcgcaactgtggttttttggttggggtactctcgttcagatcctgttggcaagcgttagtgctctgttagccgaagctctcgtactcaaactacgcaagcagagcgtagccgcagcgttgaaagataacagtgcattgctgacaggcttattgctggcggtaagtattccccccctcgcgccatggtggatggtcgtgctgggtacggtgtttgcggtgatcatcgctaaacagttgtatggcggtctgggacaaaacccgtttaatccggcaatgattggttatgtggtcttactgatctccttccccgtgcagatgaccagctggttaccgccacatgaaattgcggtcaacatccctggttttatcgacgccatccaggttatttttagcggtcataccgccagtggtggtgatatgaacacactacgcttaggtattgatggcattagtcaggcgacaccgctggatacatttaaaacctctgtccgtgccggtcatagcgttgaacagattatgcaatatccgatctacagcggtattctggcgggcgctggttggcaatgggtaaatctcgcctggctggctggcggcgtatggttgctatggcagaaagcgattcgctggcatattcccctcagcttcttagtaacgctggcgttatgcgcaatgttgggctggttgttcagtccagaaacactggcagcaccgcaaattcatctgctgtctggagcgaccatgctcggcgcattctttattttgactgacccggttaccgcttctacgaccaatcgtggtcgtcttattttcggcgcgcttgcgggcttattagtctggttgatccgcagtttcggcggctatcctgacggcgtggcttttgccgtcctgctggcgaacatcacggttcctctgatcgattactacacgcgtccgcgcgtctacggccatcgcaaagggtaaaccatgctgaaaactatccgaaaacacggcattacgttggcgctatttgcagcgggtagtacagggttaactgcggccatcaaccagatgaccaaaacgacgattgctgaacaggccagtctgcaacaaaaggcgttatttgatcaggtgctgccagccgaacgctataacaatgcgctggcacagagttgctatctggtaactgcgccagagttaggtaaaggtgagcatcgggtttacatcgccaaacaggatgacaaaccggcagccgccgttctggaagcaaccgcgccagatggctattccggtgcgattcagctgctggtgggagccgattttaacggcacggtacttggcacgcgcgtgacagagcaccacgaaacgccagggcttggcgataaaatcgaactgcgcctttctgactggatcacccattttgcgggtaaaaaaatcagtggtgcagatgatgcgcactgggcggtgaagaaagatggtggtgatttcgaccagttcaccggcgcgacgattactccccgcgcggtggttaatgcggtaaaacgcgccggattgtacgctcagacgttaccggcacaactttctcaacttcctgcctgtggagaataaagcgtgagcgaaattaaagacgttattgttcaggggttgtggaaaaacaactctgcgctggtccagttgctcggcctttgtcctctgttggcggtcacgtccactgccactaacgctctgggtttaggacttgcgactacgctggtactgacgctgaccaacctgaccattagcacgctgcgtcactggacgccagccgagatccgcattcccatttacgtgatgatcatcgccagcgtggtcagcgctgtacagatgctgatcaacgcctacgcctttggcctgtatcaaagtttagggatttttattccgctgattgtcactaactgtatcgttgtgggccgcgctgaagccttcgccgccaaaaaaggtccggcgcttagcgcactggacggctttagtattggtatgggcgcaacctgcgccatgttcgtgctgggtagtctacgcgaaattatcggcaatggcacattgtttgacggtgcagatgcgctgttaggtagctgggcaaaagtattacgcgtggagattttccacaccgactcccctttcctgctggcgatgctgccaccaggtgcatttattggcctgggactgatgctggcaggaaaatacctgattgatgaaagaatgaaaaagcgccgtgctgaagcagctgcagaacgtgcattgccaaacggtgaaacagggaatgtctgatgaataaagcaaaacgcctggagatcctcactcgcctgcgtgagaacaatcctcatcccaccaccgagcttaatttcagtagcccttttgaattgctgattgccgtactgctttccgctcaggcgaccgatgtcagtgttaataaggcgacggcgaaactctacccggtggcgaatacgcctgcagcgatgcttgaactgggcgttgaaggggtgaaaacctatatcaaaacgattgggctttataacagcaaagcagaaaatatcatcaaaacctgccgtatcttgctggagcagcataatggcgaggttccggaagatcgtgctgcgcttgaagccctgcccggcgtaggtcgtaaaacagccaacgtcgtattaaacactgcattcggctggccgactattgctgtcgacacgcacattttccgcgtttgtaatcgtactcaatttgcgccggggaaaaacgtcgaacaggtagaagaaaagctactgaaagtggttccagcagagtttaaagtcgactgccaccattggttgatcctgcacgggcgttatacctgcattgcccgcaagccccgctgtggctcttgtattattgaagatctttgtgaatacaaagagaaagttgacatctgaagaaaaggggtaacaccgattaccccattgataacctttctttatcctcttttaaaacatctttttaacgtcaatgatgccattgcttagcgttatcatcaggtaatccgtttgcggataaccaaaaatgcaggttaattgtttttttaatagcgaaattttctattcattcgtgatcaagatcacgatgctgtcgcaatgtaaaaacattgcaagaatcaggttaaatcatttaaatttacacacgcaacaaatattgacctacaaaacattacactggctatttttcagaaactggactatctcactagtaaaaacgctaaatagcagaacatatcgccgttaagccatcacccccctctcagtgcagtgaaaaaatctgccgttacgttttttgaaaaatttaacgctggataacatttcccggaatggttgaattccccgcctcagttatatgtaacagattattacaaaggacttgtctgaaagtgcaagatagtgaacattacctgccgtttcccctcccactataacaattgcgcgtatgttttttatacataacgcgagaaagcacccccgttaatatgggatgtaaaaaaagaggtaaaagtgtccactgcaaaccaaaaaccaactgaaagcgtcagtttgaacgctttcaaacaaccgaaggcgttctatctcatcttcagcattgagttatgggaacgttttggttattacggcctacaaggaattatggctgtttacctggttaaacaactgggtatgtctgaagcggatagtatcacccttttctcttcctttagtgccctggtttatggtctggtcgctatcggcggctggttaggtgacaaggtactgggtactaaacgcgtaattatgctcggcgctattgtgctggcgattggttatgctctggttgcctggtctggtcacgacgccggtatcgtttatatgggtatggcggctattgcggtcggtaacggcctgtttaaagctaacccgtcttctctgctttctacatgctatgagaaaaacgacccgcgtctggacggtgcattcaccatgtactacatgtccgtcaacatcggctctttcttctctatgattgctacgccgtggctggccgcgaaatacggctggagtgttgcgtttgcgttgagcgttgtaggcctgctgatcactatcgttaacttcgccttctgccaacgctgggttaaacagtacggtagtaaaccagacttcgagcctatcaactaccgtaacctgctgctgaccattattggtgttgtggcactgatcgctatcgccacctggctgctgcacaatcaggaagttgcgcgtatggcgctgggcgttgttgccttcggtatcgtggttatcttcggtaaagaagccttcgcgatgaaaggtgctgcgcgtcgtaaaatgatcgttgccttcatcctgatgctcgaagccattatcttcttcgtgctgtacagccagatgccaacgagtctgaacttctttgcgattcgtaacgttgagcactccattctgggtctggccgtagaacctgagcagtatcaggcactgaacccgttctggatcatcatcggtagtccgattctggccgctatctataacaagatgggcgataccctgccgatgccaaccaagtttgcaatcggcatggtgatgtgttctggtgcgttcctgattctgccgctgggtgcgaaattcgcgtctgacgctggtatcgtgtctgtaagctggctggtcgcaagctatggcctgcagagcatcggggaactgatgatctctggtctgggtctggcaatggttgctcaactcgttccgcagcgtctgatgggcttcattatgggtagctggttcctgaccactgccggtgcaaacctgattggtggttatgttgcgggtatgatggctgtgccggataacgttaccgatccgctgatgagtctggaagtctatggtcgcgtattcttgcagattggtgtcgctactgccgttattgcagtactgatgctgctgaccgcgccgaaactgcaccgcatgacgcaggatgacgctgcagacaaagcggcgaaagcagccgtagcgtaaaattcagggaaactcttttacaagccgctaacttttcgttagcggctttttttttgttcagcaacgcactaccatactttaaaccacagacaaaaggagttaccgatgaaattgttctacaaaccgggtgcctgctctctcgcttcccatatcaccctgcgtgagagcggaaaggattttaccctcgtcagtgtggatttaatgaaaaaacgtctcgaaaacggtgacgattactttgccgttaaccctaaggggcaggtgcctgcattgctgctggatgacggtactttgctgacggaaggcgtagcgattatgcagtatcttgccgacagcgtccccgaccgccagttgctggcaccggtaaacagtatttcccgctataaaaccatcgaatggctgaattacatcgccaccgagctgcataaaggtttcacacctctgtttcgccctgatacaccggaagagtacaaaccgacagttcgcgcgcagctggagaagaagctgcaatatgtgaacgaggcactgaaggatgagcactggatctgcgggcaaagatttacaattgctgatgcctatctgtttacggttctgcgctgggcatacgcggtgaaactgaatctggaagggttagagcacattgcagcatttatgcaacgtatggctgaacgtccggaagtacaagacgcgctgagtgcggaaggcttaaagtaatagccatcggcccacaggtcgttgtgggccgaaatgagatatttcagagctttgttgcgctgaagtaatgttctggtttggcaatacgatcctgagcagccaccacttgcagctcatattcctgcattgctttggtggtcaccatgatttcgtagactgcagcggtcacatgttccagcgcctcctgcagcgttgccccctgaagcagtttcaccagcagtaaaccgctcgtcacatcaccaacacctaccggctggcgcataccaaaatccaccagcggacggctgatatgccaggcttcatcggcggtgaccagcagcatttcaaaacggtcacggctgtagccagctcgcgccaggtgtttaaccaacacaatttgtggcccttgcgcaatgagttcgcgcgctgccagaaccgcttcttcgacgttatttaccgcatgctcacagagtatttccagctcaaccagatttggcgcaatgatatcgctggcaggcaaaccgtgccgcacatgaaactctgcgacacccggtgcaacgatacagcctttttccggatgacccattaccggatcgcaaaaatatttcgcctgcggattcgcggctttcacctgacggacgataccgaggatatgttcaccctgctccgcgcttcccagatagccacttaatacggcatcacaggtgtgtaatttatcaatggcggcaatgccttgcacaatttcggttaaatggctgggcggcatcacgcagccagtccatttgccgtattgggtgtgattagaaaattgaacggtgttcagcggccagacgttcgcgcccaggcggcgcatcggaaactctgccgcactgttacccgcatgaccataaacaacgtgagactggatagcgagaatatttttcatcatgttccctgtataaaaaccagggggagtgatttctcactccccctttccacttaatgcattatttccagcaaatcagacagtaattctttttaccgcgacgcagtaaggtaaaacgaccaaacagacgatcttcttctttaaagaagtattcaggatcggactgtttttcaccgttaatggtgatggcattggaggcgatagttttacgtgcctgaccacgggaaggttgcagttcagaatcgaccagtgcctgcatcaggtctgcgcccttttccatctcaaccatcggtacgccgtcctgcgccagctgttcgaagtccgcttcactcagcgcactcaaagaaccgctgaacaggcattcggtaatacgttttgccgcctgtaaaccttcttcaccgtgaaccagacgagtcacctgctccgccagtacatactgggcgcgcggtgctttaccgctgtttttatcttcttcttccagggcgttgatctcttcaatgctcataaaggtgaagaacttcaggaagcggtaaacgtcggcatccgcagtgttgatccagaactggtagaatttgtacgggctggttttcttcggatccaaccagactgcgccgccttcagttttaccaaatttggtgccatctgctttagtgatcagcggaacggtcaggccaaacacctgattctgatgcagacgacgggtcaggtcgataccagaagtgatgttaccccactggtcagaaccaccaatttgcagcaccacaccgtactgtttgttcagacaggcgaagtcataaccctgcaacaggttgtaggaaaactcagtgaagctaatcccctgatcttcacggttgagacgctgcttaaccgcttctttgttgatcatctggttaacggagaagtgtttgccaatatcgcgcaggaaggtcagcacattcatattgccgaaccagtcatagttgttcgccgcgatagcagagttttctccacagtcgaaatcgaggaacggggcaacctgcttacggattttgtccacccactcctgaacagtttcttcggtgttcagcttacgctcggcagctttgaagctcgggtcgccaatcagacccgtcgcgccgcctaccagcgcaaccggcttgtggcccgcctgctggaagcgtttcaggcataacaatggaacaagatgccccaaatgcaagctgtcagcggtaggatcgaagccgcaatagagcgcgatcgggccttgcgccagtcgctctgctaacgcttcctcgtccgtcacctgggctaccagcccccgctcttgcaattgtttaatcaagttactgcttgccatcaaaatctccatgtatataacgactgcacctttgccggtacacgacttttcgccagatgcgaaagagacatagaataaagtgccagaatcaggagtaccagcgattaaagcaagatttttgcatcttttcagggtgcaagacgatcaatcttccacgcatcattttcacgctggtacaaaaagcggtcatgcaggcgatgctcaccaccctgccagaactcaatctgttcaaggctgacgcgaaaaccgccccaaaagctcggcaatggcacttcgccctgttgaaacttctgcttcagctccaggaatttactttcaaggataccgcgggcagaaatgcgactggactgcttgctaacccatgcaccaatctggctatcacgcgggcggctatgaaaatatttcatcacttcgagagtgctaagtcgttctgctttaccgatcaccatcacctggcgctcaagggtatgccacgggaacagcaggctaacgcgcggattattttcgatttgatgtgctttacggctgccgaggttggtgtaaaacaccatgcctttttcgtcgtaatgtttgagtaaaacgatgcgctgataaggctgaccatgttcatccacggtagcgaccaccatcgcggtagggtccgccagtttggcttcacaagcctgagagagccaacgttcaaaaagggttaatggatcggcgggaagatcgcggcggcgtaacccgcctttggtgtattcacggcgcagatgcgcgatttgctgcaattcgtcgttatcagacatggttttctttacggattgtcagtgggtgacgctattgtgcgccgcccctggaaaaatctcaacgctgtggattttgtaactgacagttattcaagacgatgcggtcgcgtttatagacagtcgcttcatcgcctttgctccagaaaacatagattccgtcagtgtaacgcgcgccagaggcactaatgccctgtttgagatgcagtagttgattatcgtaaacaaaactgacctcctggcgcggattattcagtttgaccgtcaacggtttttcatcacactggtattccagcgtatcggtttgcatgcgctcaaccagctgattaaaggcgctacagccggagagaaggaccggcaaaatgataattaacagttttttcatagtcatatcccgaagactttcctggtctggagggcaatacgccctccctaacgttccaagtgtaacggcagacgcggtaagaaaaattcagttaactctgatatcacgggttagcggggaaaatagcccccagtaccgtctcctggcttgcgccagtgacggaaggcagatttcctggtaatcccgccagcgtccgccaggcaagccaggcgaaagccaatgcttccatgtcatcgccactaatgccaacggcatcggtggtggtgacttctgtgcctggcagtaatgccgccagacgcgccatgagtagcggattacgactacctccaccacataccatcaatcgttcgcagccaccgctcaacaaaacttgttcagaaatggtcacggcggtgagttctgccagtgtcgcctgcacatctcggggatcaacacccggaaaatggcgcaaatggcgctccagccaaccatagttaaagtattcgcgtccggtgcttttcggtgcaggttggctgaaatacgggtcgctgagcatattttgcagcagtgggagaataactttacccgcccgtgcccactcggcatctttatcgtaaggtttaccggcctgacgccagatccaggcatccatcagcatgttaccaggaccggtatcgtagcccccaaccggctgcccaggaatgagcagactcagattggcgatgccgccaatattgagcaccattcgtcgctcggttgggtgagccagcagcgcatgatggaacgcaggtaccagcggtgcgccttgtcctcccaaggcaatatcgcgacggcgaaaatcaccgacaaccgtaattccggtgcgtgccacaatttgattgttatcgccaatctgtaaagtgtgtggtgccacgcccgtcggttcatgccagacggtttgaccgtgacaaccgatcgcaactatatctcttgcctgcagattttgttccttaagcaaggcattgaccgcatcagcaaaaagttgcccgagttgagtatcaagctgtccaaactggctaagtgtaagctgctggccctggcaaatatccagtacagcctgtttcagagataccgggatcggccaactcaaacttgccagctgtgcgacccggtgttcatcaattgtcgccaacacaacatcaacaccatcaaggctggtgccactcataacgccaataaagcggccgcttttcatagttcatcctttttcaatctgacgtttgcgcaccactcaaacataaacttttcgtgaataccatgcggaatgaccgatttttaccgttggtagtaaaacattatcttcaaatcaataatcatcatgaatgttttgtttataattggttgatcctactttcattatgatttgctcatatttggtagaacatgtaaccatggattcacatatgccatatactttgaccatgagggatgcttgcgtggcgtttcatggtgaacaggagatttttcaatgattaaacgcgtattggttgttagtatggtaggtctgtctcttgtcggttgtgttaataacgacaccctgagtggggatgtttataccgcttctgaagcgaaacaagtacagaatgtcagctatggcaccatcgttaacgtacgtccggtacagattcagggcggtgatgattccaacgttatcggtgcaattggcggtgctgttcttggtggtttcctggggaatactgttggtggcggaaccgggcgttctctggctactgcagcaggcgctgttgcaggtggcgtagctggtcagggcgtacagagtgcaatgaacaaaacgcagggtgtcgagctggaaattcgtaaagacgatggtaataccatcatggtggtacagaaacaaggcaacactcgtttctctccgggccaacgtgtcgtactggccagcaatggcagtcaggtgaccgtttctccgcgctaaataagtttgcgtgtggtcaggttactgaccacacgcccccttcatttcaccctttggcctgtaactcaatgatattatgctcaagttttgcgatgagcgtaatcagttgctccagttcctctgcggagatgccatgtaatatttccgcgcgggttttgttaataacagcttccatttcgctgatcagcggctctgccttttccgtcagtttaatacgtttagcccgacgatcgctggcacaagtttgacggctaattaaccctttttcttccagttggtccagagtacggaccagacttggctgctcgatgccaatcgcttttgccagttgaatttggctctggtctggaggtaactgatggatattgtgtaacgtaacccaatgggtttgtgttaactccagcggtttcaggcgatggtctatcagagcacgccatatgcgcaccaaccgtgccagatcagaacctagtgggctttccaatttcatctccttataattagcttgctaagatattatgcggcttttagaatagtgtgcagcaattgtattgctaaaacaaatgtattgctgcatttggttaccgtcagacatatttttcagaaattgcgcgtaaatttttcgcacttaaagaatatttattaatctaacgcaatatattcggtcgtaaaggaatctactttgtgaagtttatgctcaatgcaacaggattgcccttacaagatctggtgttcggtgcgtccgtctactttcctccgtttttcaaagcattcgcgtttggattcgtcatctggcttgtcgtacaccgcctgcttcgtggctggatctacgccggtgacatctggcatcccttgttaatggatttaagcctgtttgcgatttgcgtttgccttgctctggcaatactgattgcgtggtaactatgagtattaaaacaattaagtatttcagtacaatcattgtagcggtagttgcggttcttgccggatggtggctgtggaattattacatgcaatctccgtggacacgcgacgggaaaatacgcgcagaacaggtttctatcaccccacaggtgagcggacgtattgttgagctgaatataaaagacaaccagctggttaacgcgggggatcttctgctcacgatcgataaaacgccctttcagatcgccgagctgaacgcacaggctcagctggcgaaagcgcaatctgacctcgcaaaagccaataacgaagcgaatcgtcgtcgtcatctcagtcaaaattttatttctgccgaagaactcgataccgctaacctcaatgttaaagcgatgcaggccagtgttgatgccgcacaggcgacgctgaaacaggcacaatggcaactggcgcaaacggaaattcgcgccccggtgagtggatgggtgactaaccttactacccgcatcggcgattacgctgataccgggaaaccgctgtttgcccttgtcgacagccacagcttttacgtcattggttattttgaagaaaccaagttgcgccatatccgcgaaggtgcaccagcacaaattaccctctatagtgataacaaaacgttacagggtcacgtttccagtatcggtcgggcgatttatgatcagagcgttgaaagtgacagtagccttattccggatgttaaacctaacgtcccctgggttcgactcgcccaacgcgttcccgtccgctttgcgctggataaagtcccaggcgatgtcacgttggtgagcggcaccacctgtagcattgccgtaggtcaataatgaacgcaagcagttggtccttgcgcaatttgccctggttcagggccacgctggcgcaatggcgttatgcgttacgcaataccattgccatgtgtctggcgctgacggttgcctattatttaaatctggatgaaccctattgggcgatgaccagcgctgcagtggttagctttcccaccgttggcggtgttatcagcaaaagcctcggacgcatcgctggcagtttgctcggagccattgcggcactgcttcttgccgggcatacgctcaatgagccgtggttttttctattgagcatgagcgcgtggcttggcttttgtacctgggcctgtgcgcacttcacgaataacgtcgcgtatgcatttcaactggcgggctacacggctgccatcatcgcctttccgatggttaatattactgaggccagccagctgtgggatatcgctcaggcgcgcgtttgcgaggtaatagtcggtattttgtgcggcggcatgatgatgatgatcctgccgagcagttccgatgctactgcccttttaaccgcattgaaaaacatgcacgcccgattactggaacatgccagtttactctggcagcctgaaacaaccgatgccattcgtgcagcacatgaaggggtgattgggcagatactgaccatgaatttgctgcgtatccaggctttctggagccactatcgttttcgccagcaaaacgcgcgccttaatgcgctgctccaccagcaattacgtatgaccagtgtcatctccagcctgcgacgtatgttgctcaactggcccagtccgccaggtgccacacgagaaattctcgaacagttgctgacggcgctcgccagtagccaaacagatgtttacaccgtcgcacgtattatcgccccgctacgcccgaccaacgtcgccgactatcggcacgtcgccttctggcagcgactacgttatttttgccgcctttatctgcaaagtagtcaggaattacatcgtctgcaaagcggtgtagatgatcataccagactcccacggacatccggcctggctcgtcataccgataacgccgaagctatgtggagcgggctgcgtacattttgtacgttgatgatgattggcgcatggagtattgctagccaatgggatgccggtgccaatgcattaacgctggcagcaattagctgcgtactctactccgccgtcgcagcaccgtttaagagcttgagtcttctgatgcgcacgctggtgttacttagcctattcagctttgtggtcaaatttggtctgatggtccagattagcgatctgtggcaatttttactgtttctctttccactgctggcgacaatgcagcttcttaaattgcagatgccaaaatttgccgcattgtgggggcaactgattgtttttatgggttcttttatcgctgtcactaatcccccggtgtatgattttgctgattttcttaacgataatctggcaaaaatcgttggcgtcgcgttggcgtggttagcgttcgccattctgcgtccaggaagcgatgctcgtaaaagccgccgccatattcgcgcgctgcgccgggattttgtcgatcagctaagccgccatccaacactgagtgaaagcgaatttgaaagcctcacttatcatcacgtcagtcagttgagtaacagccaggatgcgctggctcgccgttggttattacgctggggtgtagtgctgctgaactgttctcatgttgtctggcaattgcgcgactgggaaagccgttccgatccgttaagccgagtacgggataactgtattagtctgttgcggggagtgatgagtgagcgtggcgttcagcaaaaaagtctggcggccacacttgaagaattacagcggatttgcgacagccttgcccgtcatcatcaacctgccgcccgtgagctggcggcaattgtctggcggctgtactgcagccttagccaacttgagcaagcaccaccgcaaggtacgctggcctcttaattacttaattacaccacaggcatagcgttcaccgccaccgcccagcggtttaggttgatcggacatattatcgccgccaacgtggaccatcagcgctttgtctttgatttcatccagacttttcagacgaggcgcgatgacggcatcggtagctttgccgtcattattgacgaccagtgcaggcagatcgcctaaatgcccggcaccttctggcccttcatgtttaccggtattttgtggatcaagatgcccgcctgcggattccgcggcgctggctttgccatctttggtggctggctggcagcttcctttggcatgaatatggaagccatgttcaccggggggtaatgctttcagatcggggctaaactccagacctttatcggtttcagtaatggtgacgctaccaatactctgccctaccccttggctcgtgacgaggttcatctcgactttttcactggcagcttgtgcgccggttgcaacaaccagcgccagaatagccagactaaaacgtttcataggacctccgttcattgtgcattcctgaataagtgtaaaccagtgacacatttttgaacggcggctattcctaaaagtgcttacggtacgtcgtaccccagtgccgctttacggatacgaaaccattgttgacgggtcattttcagtgtttctgcttcgacagctgcccgtacgcgctcaattttaccactaccgataattggcagcggctggcttggtaaacgtaatacccaggcgtaaaccacctgttcaatgctgcccgcgtttaactcctctgccaccacagccagttcatcacgcagcggctggaaataatcatcattaaacagacgaccaccaccaaggcaggaccacgccatcggacgaacacgcagttgttgtagttggtcgagcgtgccatccagcagtaacggctgatgcaccggggatatttccacctgattagtggcaagggtaaacggcagacgactttgcaacagggcaaattgcgcaggcgtaaagttgcttacgccaaaatgacgcactttgccgctctgatgcagatgtttgaacgcgtccgccacttcatcggcatccattaacgggtctggtcggtggattaacagcaaatccagatgatcggtcgcgagattaattaggctctgttcggcgctcttaatgatgtgatcgcggtcagtgatgtaatgaccaatgacgttttcttcacgcgcggtcgtcgcgataccgcatttactgacgatttccatccgttcacgcaggtgaggtgccagtttcagtgcctcgccaaacgccgcttcgcactgatagccaccataaatatcagcatggtccacggtggtcacgccgagatccagatgctcttcaataaaactgaccagctggcgggcggacatattccagtccatcaatcgccagtagcccatcacaaaacgggaaaactccgggccttgcggcgcaatagtaatacgctgaaccataatcgcttcctcttatcagatatgagaggagtatacgcaagattaggttcaaaagagacttggttgctccggttcgtcactactcgctggcttatttgcgcgtaatttgcgcattaatcgctgccgacaaaggcgcagcacctcttgtttttcgccatcgctcattttattccagttaaaacgctcatcacgactacgaaaacagccgcgacaaaacccgcgttcgtcagactggcaaattccccggcacgggctctggacgggaaagaactctaattgctccgccacttcgccctcctcagataagattattaccattattgaagctgttaatgtccaaagtagcaactttgcttgcactagaccgactggtctactacactccaacgcatgaacaaacacaccgaacatgatactcgcgaacatctcctggcgacgggcgagcaactttgcctgcaacgtggattcaccgggatggggctaagcgaattactaaaaaccgctgaagtgccgaaagggtccttctatcactactttcgctctaaagaagcgtttggcgttgccatgcttgagcgtcattacgccgcatatcaccagcgactgactgagttgctgcaatccggcgaaggtaactaccgcgaccgcatactggcttattaccagcaaacactgaaccagttttgccaacatggaaccatcagtggttgcctgacagtaaaactctctgccgaagtgtgcgatctgagtgaagatatgcgcagcgcgatggataaaggtgctcgcggcgtgatcgccctgctctctcaggcgctggaaaatggccgtgagaaccattgtttaaccttttgtggcgaaccgctgcaacaggcacaagtgctttacgcactgtggcttggcgcgaatctgcaggccaaaattagccgcagtttcgagccactggaaaacgcgctggcccatgtaaaaaacattattgcgacgcctgccgtttaacaggcattttttatcaccagacgaccgggagcctttatgagttctgaaaaactgtattccccactgaaagtgggcgcgatcacggcggcaaaccgtatttttatggcaccgctgacgcgtctgcgcagtattgaaccgggtgacattcctaccccgttgatggcggaatactatcgccaacgtgccagtgccggtttgattattagtgaagccacgcaaatttctgcccaggcaaaaggatatgcaggtgcgcctggcatccatagtccggagcaaattgccgcatggaaaaaaatcaccgctggcgttcatgctgaaaatggtcatatggccgtgcagctgtggcacaccggacgcatttctcacgccagcctgcaacctggcggtcaggcaccggtagcgcctagtgcacttagcgcgggaacacgtacttctctgcgcgatgaaaatggtcaggcgatccgtgttgaaacatccatgccgcgtgcgcttgaactggaagagattccaggtatcgtcaatgatttccgtcaggccattgctaacgcgcgtgaagccggttttgatctggtagagctccactctgctcacggttatttgctgcatcagttcctttctccttctagtaaccatcgtaccgatcagtacggcggcagcgtggaaaatcgcgcacgtttggtactggaagtggtcgatgccgggattgaagaatggggtgccgatcgcattggcattcgcgttagtccaatcggtactttccagaacacagataacggcccgaatgaagaagccgatgcactgtatctgattgaacaactgggtaaacgcggcattgcttatctgcatatgagtgaaccagattgggcggggggtgaaccgtatactgatgcgttccgcgaaaaagtacgcgcccgtttccacggtccgattatcggcgcaggtgcatacacagtagaaaaagctgaaacgctgatcggcaaagggttaattgatgcggtggcatttggtcgtgactggattgcgaacccggatctggtcgcccgcttgcagcgcaaagctgagcttaacccacagcgtgccgaaagtttctacggtggcggcgcggaaggctataccgattacccgacgttgtaatccaacattgcgagcggcgtaaagccgccgctatactaaaacaacattttgaatctgttagccattttgaggataaaaagatgcgtcttcttcataccatgctgcgcgttggcgatttgcaacgctccatcgatttttataccaaagtgctgggcatgaaactgctgcgtaccagcgaaaacccggaatacaaatacagtctggcgtttgttggctacggcccggaaaccgaagaagcggtgattgaactgacctacaactggggcgtggataaatacgaactcggcactgcttatggtcacatcgcgcttagcgtagataacgccgctgaagcgtgcgaaaaaatccgtcaaaacgggggtaacgtgacccgtgaagcgggtccggtaaaaggcggtactacggttatcgcgtttgtggaagatccggacggttacaaaattgagttaatcgaagagaaagacgccggtcgcggtctgggcaactaatctcctgccgggcgtgaactcatcgcgcccgcatctttactgcatcgacaagtaatatttgtcataatgcgcgctgcaatttatccgtattaagagaatcagatgtccgataacgctcaacttaccggtctgtgcgaccgttttcgtggtttttatcctgttgtgatcgatgttgaaacagccggatttaacgccaaaaccgatgcgctgcttgagattgccgccatcaccctgaaaatggatgaacaaggctggctgatgccggacaccacattacatttccacgtcgaaccatttgtcggcgcaaatttgcaaccagaagccctcgccttcaacggcattgacccgaacgatcccgatcgcggcgcggtcagcgaatacgaggcgctgcacgaaatttttaaagttgtacgtaaaggtattaaagcgagcggctgtaaccgcgccattatggtggcgcacaatgccaattttgatcacagctttatgatggccgccgcagaacgcgccagtctgaaacgtaacccgttccaccctttcgccacttttgacactgctgcactggccgggctggcactcggacaaaccgtattgagtaaggcttgccagaccgctggcatggacttcgacagcacccaggcgcactccgcgctgtacgacaccgaacgcactgctgtgctgttttgtgaaatcgtcaaccgctggaaacgtctgggaggctggccgctatctgccgccgaagaggtgtaatcgagtcgatgcctgatgacatgcaatgattcaggcatctatagtgaggctattccacgcatcctgcatgatattcacggggaatagcgttaatggcagataatccagaccctagtagcctcctgccggacgtgtttagtccggcgacccgcgactggtttcttcgcgcctttaaacagccgaccgctgtccagccgcaaacctggcatgtggcggcgcgaagcgaacatgcgctggtgattgcaccgaccggctccgggaaaacgctggcagcatttctctacgccctcgatcggctcttccgcgaaggcggcgaagatacccgcgaggcgcataagcgtaaaaccagtcgcatcctctatattagtccgataaaagccctgggcaccgacgttcagcgcaacttgcagatcccgttgaagggtattgccgatgaacggcggcggcgcggcgaaacggaagtcaatcttcgcgtagggatccgtactggcgatacgcctgcacaggaacgcagcaaactcacccgtaatccgccggatattctgatcaccacacccgaaagtctctatctgatgctgacctcccgcgcgcgcgaaacgctacgcggcgtcgaaacggtaattattgatgaagtccacgcggtagcgggcagtaaacgtggtgcgcatctggcgttaagtctggagcggctcgatgcgctgctccacaccagtgcacagcgaattggcctttctgccactgtgcgcagtgccagcgatgtggcagcatttcttggtggcgatcgcccggttacggtagtcaacccgcccgcaatgcgccatccgcagatacgaattgtcgtaccggtcgccaatatggatgatgtcagtagcgtcgccagcggcaccggcgaagacagccatgccggccgggaaggctccatctggccatatattgaaacgggtatccttgatgaagtgttgcgccatcgcagcaccattgtctttactaatagccgggggctggcggaaaaactgacggcacgattaaatgagctttacgccgcacgcttacagcgttccccgtctatcgccgttgatgcggcccatttcgagagcacctccggcgcaacctctaaccgtgtacaaagtagcgacgtttttattgcccgcagtcaccacggctccgtctctaaagaacaacgagcaatcaccgaacaggcgctgaaaagcggtgaattacgctgcgtggtcgcaacctccagtcttgaactggggattgatatgggcgcggtggatctggtgattcaggtggcaacgccgctttctgttgccagtgggttacaacgcattggtcgcgccggacatcaggttggcggtgtatctaaagggctgtttttcccccgtacccggcgtgatttagtcgattccgcagtcattgtagagtgtatgttcgcaggcaggctggaaaacctgacaccaccgcataatcctctcgacgtccttgcgcagcaaaccgttgccgccgcggcgatggatgcattacaggtagacgaatggtactcccgcgtacgccgtgccgcaccgtggaaagatctgccaagacgtgtttttgacgccacgctggatatgctttccgggcgctatccctctggcgatttttctgcttttcgccccaaactggtctggaacagggagaccgggatattgaccgcccgacctggcgctcaattgttggcggttaccagcggcggcaccattccggatcgtggcatgtatagcgtgttattacccgaaggtgaagaaaaggccggtagccggcgggtgggtgaactggatgaggagatggtatatgagagccgggtgaacgacattatcactctcggcgctaccagttggcggatccagcaaatcacccgcgatcaggtgattgtgactcctgctccgggtcgttctgcccggctccccttctggcgtggtgaaggtaacggacgtccggctgaattaggcgagatgatcggcgattttcttcatttgctggcggatggcgcgttcttttccgggactattcccccgtggctggcagaagaaaatacgatcgccaatattcaggggttgattgaggagcagcgcaacgcgacgggcatcgttccggggagtcgccatctggtcctcgaacggtgccgtgatgaaattggtgactggcgtattattttgcactctccctatggaagacgggtgcatgaaccctgggcggtggcgattgccgggcgaatacatgcgctatggggcgctgacgcgagcgtggtcgccagtgatgacggcattgttgcacgtattcctgacaccgatggtaaattgcccgatgccgcgatttttttgtttgaaccagaaaagttgctgcaaattgtccgcgaggcggtaggcagcagcgcacttttcgccgcccgttttcgcgaatgcgccgcgcgggcattattaatgccggggcgcactccgggccatcgcaccccgctttggcaacaacggctgcgcgccagtcagttgctggaaatcgctcagggatatccggattttccggtcattctcgaaaccctacgcgaatgtctgcaagatgtttatgatcttcccgcactggaacgtttgatgcgtcgcctgaacggtggcgaaattcaaatatccgatgtaacgaccactacgcccagccctttcgccacaagtttattgttcggctatgtcgcggaatttatgtaccagagcgacgccccgctggcagagcgccgggcatccgtactgagcctggacagcgagttactgcgcaatctactcggacaggtcgatccgggggaattactcgacccgcaggtcattcgccaggtggaagaagagttgcaacgactggctcctggcagaagagcgaaaggtgaagaaggattgttcgacctgctgcgcgaactggggccaatgaccgttgaagacctggcgcaacggcatacaggcagcagtgaagaggttgcgagctatctggaaaatcttcttgcagtaaaacgaatcttcccagcgatgattagcggacaggagcgtcttgcctgtatggatgatgccgccaggctgcgtgatgccctcggcgtacgactaccagagagtttgccagagatttatttacatagagtcagttacccgcttcgcgacctctttctgcgctatctccgggctcatgctctggtcacggctgaacaactggctcatgagtttagtctcggtattgccattgtcgaagagcagcttcagcaactgcgtgaacagggtctggtgatgaatctgcaacaagacatctgggtgagcgatgaagtatttcgtcgtctgcgtttgcgcagcctgcaagccgccagagaagcgacgcgtcccgttgcagccacgacctatgcgcgattgctgctggaacgtcagggcgtattacccgccaccgatggtagcccggcgctctttgccagtacaagcccaggcgtttatgagggcgtagatggcgtgatgcgggtgatcgaacagcttgccggagtcggtttacccgccagtctctgggaaagccagatcctgcctgcccgcgtacgcgactatagcagtgaaatgctcgatgaattactggcaaccggtgcggttatctggagcgggcaaaaaaaactgggtgaagatgacggcctggtggcactgcatctacaggaatatgctgcagaaagcttcactcccgccgaagcggatcaggcgaatcgtagcgcgctgcaacaagcgatagtcgctgttctggctgacggaggagcctggtttgcacaacaaatcagccaacggatacgcgacaaaatcggcgaaagcgttgatctctctgccctgcaagaggcgttatgggcgctggtctggcaaggcgtcatcaccagcgacatttgggcaccgttacgcgccctcacccgcagcagttccaacgcacgcaccagtactcgccgcagtcaccgggctcgtcgtggacgtcctgtctatgcgcaacccgtcagcccgcgggtatcttacaacacaccaaatctggctggacgctggagcttattgcaggtggagccactaaacgataccgaaaggatgctggcgctggcggaaaatatgctcgaccgctacggcatcatcagtcgtcaggcggtgatagccgaaaatatccctggcgggtttccaagcatgcaaacgctttgtcgaagtatggaagactccgggcgaattatgcgaggtcgttttgtagaaggtctgggtggcgcgcaattcgctgaacgtctgactattgaccgattgcgcgatctggcgacacaagccacgcaaacgcgccactatacaccagtggcgctctctgccaacgatccggctaatgtgtggggaaatcttctgccctggcctgcacatccggcaacgctggttccaacgcgtcgggcgggtgcgctggtggtcgtttctggcggcaaattgttactctatctggcgcaaggtggcaaaaaaatgctggtctggcaggaaaaagaggaattactcgccccagaggttttccacgcgctgactaccgcactgcgtcgcgaaccacggctgcgctttacgctaacagaagtgaatgatctaccggtccggcaaacgccgatgtttacgctgctgcgtgaggcgggatttagtagtagcccacaagggctggattggggataaagaaaggactgacggatgcccgttcgcatccgtcagtattgcaggacggattattccgcgtccggctcttcagacttgtatttagcggcagtttctttgatcagctgctgcagttcgccacgctgatacatttcgatcacgatatcacaaccgccgaccagctcgccgtcaacccacagttgcgggaaggtcggccagttagcatatttcggcagttccgcacgaatgtccggattctgcagaatatcaacataggcaaaacgttcgccacatgcggcaagcgcctggactgcctgggcagagaaaccgcagctcggcagtttcggactacctttcatgtacagcaggatcgggttttcagcaatctggcgttggattttttcgatagtggtgctcattgtcttgcttcctcaaacttctttacggcagtaatctgacattgtagcgggtcagtgcggcatcggaaaataacattttcatcacgcttttgctattttatccctttgctctatttgttgcatttcaaatattcgtttcttctctgatgccggcaaactggcgtatttataaccatttttagctttcactgctgcatttttttgcgctcgccaacgaaacgtattttttaacaataaaagctattaactttctcttcttctatgcattagaatcatcaagttttgtaaatcagacgcaggcatgatagacctgcctttacagagggacgctcagtggcgcggataaaccgtattagcatcacgctctgtgctttactttttaccaccctgcctttaacgcctatggcccatgctagtaagcaagccagggagagttctgctaccactcatatcaccaaaaaagcagataaaaagaaaagcacggcaaccaccaaaaagacccagaaaacagcgaaaaaagccgccagtaaaagtacgaccaaaagcaaaaccgcttcttccgttaaaaaatcttccattaccgcttctaaaaacgccaaaactcgcagcaaacacgccgtcaataaaacggccagtgccagctttaccgaaaagtgtaccaaacgtaagggctataaaagccattgtgtgaaagtcaaaaatgccgcgagtggaactcttgccgacgcgcacaaagcgaaggtgcaaaaagctacgaaagtggcaatgaataaactgatgcagcaaattggtaagccatatcgttggggtggcagcagtccgcgtaccggttttgattgcagcggcctggtttattacgcttataaagatttggtgaaaattcgtattccgcgtacggcgaatgaaatgtatcacctgcgtgatgcagcgccaatcgaacgtagtgaactgaaaaacggcgacctggtctttttccgtactcagggacgcggcacagccgatcatgtcggcgtgtatgtcggcaacggcaaatttattcagagtccgcgcacaggtcaggaaattcaaatcacttctctcagtgaagactactggcagcgccactatgttggcgctcgtcgggtaatgaccccaaaaacacttcgctaaaactttaccctgttgttacggcaacagggtaagttcatcttttgtctcaccttttaatttgctaccctatccatacgcacaataaggctattgtacgtatgcaaattaataataaaggagagtagcaatgagtttcgaattacctgcactaccatatgctaaagatgctctggcaccgcacatttctgcggaaaccatcgagtatcactacggcaagcaccatcagacttatgtcactaacctgaacaacctgattaaaggtaccgcgtttgaaggtaaaagtctggaagagattattcgcagctctgaaggtggcgtattcaacaacgcagctcaggtctggaaccatactttctactggaactgcctggcaccgaacgccggtggcgaaccgactggaaaagtcgctgaagctatcgccgcatcttttggcagctttgccgatttcaaagcgcagtttactgatgcagcgatcaaaaactttggttctggctggacctggctggtgaaaaacagcgatggcaaactggctatcgttagtacctctaacgcgggtactccgctgaccaccgatgcgactccgctgctgaccgttgatgtctgggaacacgcttattacatcgactatcgcaatgcacgtcctggctatctggagcacttctgggcgctggtgaactgggaattcgtagcgaaaaatctcgctgcataataactgatggcaaatgcagcattgcctgaagcgctacgcttatcaggcctacgcggatcatcgatgtaggtcggataaggcactcgccgcatccggcaagataaatcgcacgttgtcagcaactgtaacgcagaaggttatccttctgcgtttttgtttaattagctgttagcaacgcaaactgtttcaggttgttttctggcactcataaacaccagcaataatgccagtcccgcgacaatcgctcccatcaccggcacaaagctgtatcccagcccagcggaaattaccgcaccaccagcagctgctcccagcgcatttccaagattaaaggcaccaatattgacactactagacagacctggcgcttcactggcgacacgcatcacgcgcatctgtaacggcggtacgaccgcaaaggttgctgcgccccacaccaccatgctaatagctgcgccgaactcattgcgggccaggaacgggattgccagcataatcaccatcaacaacaacaaaaagcctttcaacgtgccgttaacactacgatctgccagtttgccgccgagatagttaccgatagagaatccgacaccaatcagcaccagcattgccgtgacgaacaccggtgttgcgtgggtaatactttgcagtaccggagagatataggtgtagagagtaaacattgcaccagctcccagtaccgtcgtcagcaatgcagacagcacctgcggacgcattaataccgccagctcttttttcacttcaggtcgtgcccctgcaccacctttaggtaaactgaagaacagacttaccatactaatcactcccagccccgccgttgccagaaaactcatccgccagccgatggtttcacccaaccaggtcgccgccggcacgccaccgatatttgccagggttaaccccataaacatagtggcaactgcgctggcctgtttatgttttggcaccacgcttgcggccacgacactacccaaaccaaaaaatgctccgtgattcaggctggtcaaaatgcgactaagcatcagggtcatataatccggcgcgatggcggaaagtacgttgccgagcgtgaaaattgccatcaggaaaatcaacgcactgcggcgggcacgatgagaaagtagaagcgtcatcagcggcgcgccaaccattacgccaactgcataggcactgattaacattccggcagcgggaatgctgacatccacaccgcgcgcaatgacgggcaacaagcccattgggctgaactccgttgtcccgataccaaacgcgccaatcgccagcgccagcaacggatagttaattttcatgccttatctccacctcttcgcgtcattacgcgatattcattaaagtggcgaaagcatgacagcaatcacaaaaaaatgaaaataacaaaaagagaaaacacttttgccattttgctaacaaacaggaaggagatgcgagggagaacgcgctccctcgagaggaaatcagtgcagcgcggcagtcaaacccacggctacgatcaaaccgaggacgataatcgttgttaccagtgaaaatttaaggtcggtgctcatcaagttttctccttttttattaccacacaaaaagtgatattacgcatttttacacactgtgatgaaaaaatctcccgtcatttataatgataagtgtttttaccacttccccttttcgtcaagatcggccaaaattccacgcttacactatttgcgtactggccattgaccccttcctgacgctccgtgtcgtttttccggcgtaccgcaacacttttgttgtgcgtaaggtgtgtaaaggcaaacgtttaccttgcgattttgcaggagctgaagttagggtctggagtgaaatggaatggcaacaataaaagatgtagcgaaacgagcaaacgtttccactacaactgtgagtcacgtgatcaacaaaacacgtttcgtcgctgaagaaacgcgcaacgccgtgtgggcagcgattaaagaattacactactcccctagcgcggtggcgcgtagcctgaaggttaaccacaccaagtctatcggtttgctggcgaccagcagcgaagcggcctattttgccgagatcattgaagcagttgaaaaaaattgcttccagaaaggttacaccctgattctgggcaatgcgtggaacaatcttgagaaacagcgggcttatctgagcatgatggcgcaaaaacgcgtcgatggtctgctggtgatgtgttctgagtacccagagccgttgctggcgatgctggaagagtatcgccatatcccaatggtggtcatggactggggtgaagcaaaagctgacttcaccgatgcggtcattgataacgcgttcgaaggcggctacatggccgggcgttatctgattgaacgcggtcaccgcgaaatcggcgtcatccccggcccgctggaacgtaacaccggcgcaggccgccttgccggttttatgaaggcgatggaagaagcgatgatcaaggtgccggaaagctggattgtgcagggtgactttgaacctgaatccggttatcgcgccatgcagcaaatcctgagccagccgcatcgccctactgccgtcttctgtggtggcgatatcatggcaatgggcgcactttgtgctgctgatgaaatgggcctgcgcgtcccgcaggatgttagcctgatcggttatgataacgtgcgcaacgcgcgctattttacgccggcgctgaccacgatccatcagccaaaagatagcctgggtgaaacagcgttcaacatgctgttggatcgtatcgtcaacaaacgtgaagaaccgcagtctattgaagtgcatccgcgcttgattgaacgccgctccgtggctgacggcccgttccgcgactatcgtcgttaatcacccgttgcgggagtctcttccggctcccgcagccactccttattcagcgtctcactatcgccgagatactcaagcaaccaggttaacgcagggctcatatcattttgctgccatgtcagacaacatgcgctatccggaaaggggttttccagttctaatgctacccacttcccctcattaagccacggtttggcgaaatgtgttggcaccatccctatgcataatcctgcgctgatacaggttgcgctactttcccagtcaggcacgacaactcttttttggttatccagcaaccaggtaatacgtttaggtagcgttcggctggtgtcttcgcgcaccaagctcggccagttgcgcaacgtatcatcgctgaacgggccatccatcaacgccagcgggtggtgactggcaacaacgcaactccagcttagcatccccatatcccggaaggcataacgaccgcctaccggaatcgcgcgtgttgcgccaatcgccagttccacgcgcccgtcggaaagcgcatcccagacaccgttgaacacttcctgaaagacaagaagttcgacatcatcaaaatggcgataaaaatcaacgatcatctgccgtgtacgttctggcctgacaatattatccactgcgatagctaactgaccgcgccagccgttcgctatctgctgacattgctggcgggtgatctgcatttttttgacaacagagcgcccttctttgagaaaccacgctccagcagcggtcagctccacatcacggtgccgtcgttcaaagagcggcaccgccagccactcttccagctgacgcacggtatagctgaccgcagaaggaacgcgatgcagctcctgtgccgcagcgctaaaactaccattacgcgctaccgcatcaacaacttcgagactatattcactccacatagtctgcctgcaaaatttttgaaaccagtcatcaaatattaccgtttcacaacactaatttcactccctacactttgcggcggtgtttaattgagagatttagagaatatacatgcaacctgggaaaagatttttagtctggctggcgggtttgagcgtactcggttttctggcaaccgatatgtatctgcctgctttcgccgccatacaggccgacctgcaaacgcctgcgtctgctgtcagtgccagccttagtctgttccttgccggttttgccgcagcccagcttctgtgggggccgctctccgaccgttatggtcgtaaaccggtattattaatcggcctgacaatttttgcgttaggtagtctggggatgctgtgggtagaaaacgccgctacgctgctggtattgcgttttgtacaggctgtgggtgtctgcgccgcggcggttatctggcaagcattagtgacagattattatcctagtcagaaagttaaccgtatttttgcggccatcatgccgctggtgggtctatctccggcactggctcctctgttaggaagctggctgctggtccatttttcctggcaggcgattttcgccaccctgtttgccattaccgtggtgctgattctgcctattttctggctcaaacccacgacgaaggcccgtaacaatagtcaggatggtctgacctttaccgacctgctacgttctaaaacctatcgcggcaacgtgctgatatacgcagcctgtagtgccagtttttttgcatggctgaccggtagtccgttcatccttagtgaaatgggctacagcccggcagttattggtttaagttatgtcccgcaaactatcgcgtttctgattggtggttatggctgtcgcgccgcgctgcagaaatggcaaggcaagcagttattaccgtggttgctggtgctgtttgctgtcagcgtcattgcgacctgggctgcgggcttcattagccatgtgagcctggtcgaaatcctgatcccattctgtgtgatggcgattgccaatggcgcgatctaccctattgttgtcgcccaggcgctgcgtcccttcccacacgcaactggtcgcgccgcagcgttgcagaacactcttcaactgggtctgtgcttcctcgcaagtctggtagtttcctggctgatcagtatcagcacgccattgctcaccaccaccagcgtgatgttaagtacagtagtgctggtcgcgctgggttacatgatgcaacgttgtgaagaagttggctgccagaatcatggcaatgccgaagtcgctcatagcgaaagtcactgatctatatcgatatacttatacttaggctgctaacaaaattttgttgtatgattgaaattagcggcctatactaatttcgagttgttaaagctacgataaatattatgtttttacggggacaggatcgttcccgactcactatggatagtcatttcggcaagggttcctcctttccctctgttctacgtcggattatagactcgcggttttttctgcgagatttctcacaaagcccaaaaagcgtctacgctgttttaaggttctgatcaccgaccagtgatggagaaactatgagtagtagctgtatagaagaagtcagtgtaccggatgacaactggtaccgtatcgccaacgaattacttagccgtgccggtatagccattaacggttctgccccggcggatattcgtgtgaaaaaccccgatttttttaaacgcgttctgcaagaaggctctttggggttaggcgaaagttatatggatggctggtgggaatgtgaccgactggatatgttttttagcaaagtcttacgcgcaggtctcgagaaccaactcccccatcatttcaaagacacgctgcgtattgccggcgctcgtctcttcaatctgcagagtaaaaaacgtgcctggatagtcggcaaagagcattacgatttgggtaatgacttgttcagccgcatgcttgatcccttcatgcaatattcctgcgcttactggaaagatgccgataatctggaatctgcccagcaggcgaagctcaaaatgatttgtgaaaaattgcagttaaaaccagggatgcgcgtactggatattggctgcggctggggcggactggcacactacatggcatctaattatgacgtaagcgtggtgggcgtcaccatttctgccgaacagcaaaaaatggctcaggaacgctgtgaaggcctggatgtcaccattttgctgcaagattatcgtgacctgaacgaccagtttgatcgtattgtttctgtggggatgttcgagcacgtcggaccgaaaaattacgatacctattttgcggtggtggatcgtaatttgaaaccggaaggcatattcctgctccatactatcggtagcaaaaaaaccgatctgaatgttgatccctggattaataaatatatttttccgaacggttgcctgccctctgtacgccagattgctcagtccagcgaaccccactttgtgatggaagactggcataacttcggtgctgattacgatactacgttgatggcgtggtatgaacgattcctcgccgcatggccagaaattgcggataactatagtgaacgctttaaacgaatgtttacctattatctgaatgcctgtgcaggtgctttccgcgcccgtgatattcagctctggcaggtcgtgttcagtcgcggtgttgaaaacggccttcgagtggctcgctaaaggctattctatcgccccctctccgggggcgatttcagatcaggcttctgtgcctggttgattcatggcattttctcgtgccgccagcacacgttctaccgtatctaccactgcctgagtttgtggatcgatttcaatgttgacgcgtgcgccaagttttttcttcccaagagtcgtgcgttccagtgtttcccgaattaaatggacgcaaaaacgcgttggcgtgacttcgccgacggtcaggctaataccgtcgatgccaataaatcctttgtacagaatatatttcatcaactgactatcctggactttaaaccagatctggcgattattttcactggttaatattttcgccacttcagcagtggtcataatatgaccactcattaagtgtccgccaatttcatcactgaatttcgccgcacgctcaacgtttacccaatcccccacttttaaatcgccaagattggtaatgcgtaacgtttctttcatcaggtcaaaactgacatggttgccgttaatttccgtcacggtcaggcagcaaccgttatgcgccacggaagcaccggtttccaggccgtccagcatgtggtcgggtaactccaccacatgcgtacgaaaatttggtttctcgtcaatgctcaccagttttgcggtgccctgtacaatccccgtaaacatacttacaactcctgaaatcagttaagacattctgttcagcacaatagcaggtggaaaacgcccttaccagtgaaggggtaagaatggctattttttcactggagaattaataaatcctcgctacaatagactgaatttcccctgcttcttctttttgctgcccattcaggcggctttttagtctctcatataactacaaataaaaggtgttcacgtgcagaagtatatcagtgaagcgcgtctgttattagcattagcaatcccggtgattctcgcgcaaatcgcccaaactgcgatgggttttgtcgataccgtgatggcgggcggctatagtgccaccgacatggcggcggtcgctatcggtacttctatctggcttccggcgatcctctttggtcacggactgctgctggcattaacgccggttatcgcgcaattaaatggttccggtcgacgtgagcgcattgcgcatcaggtgcgacaaggtttctggctggcaggttttgtttccgttctcattatgctggtgctgtggaatgcaggttacattatccgctccatggaaaacatcgatccggctctggcggacaaagccgtgggttatctgcgtgcgttgttgtggggcgcgccgggatatctgttcttccaggttgcccgtaaccagtgtgaaggtctggcaaaaaccaagccgggtatggtaatgggctttatcggcctgctggtgaacatcccggtgaactatatctttatttatggtcatttcggtatgcctgagctcggtggcgttggttgtggcgtggctactgcggcggtgtattgggtcatgttccttgccatggtttcttacattaaacgcgcccgctccatgcgtgatattcgtaacgaaaaaggcaccgcaaaacccgatcctgcggttatgaaacgactgattcaactcggtttgccgattgcgctggcactgttctttgaagtgacactgtttgccgtcgtggctctgttagtgtctccgctcggtattgttgatgtcgcaggacaccagattgccctgaactttagtagtctaatgttcgtgcttccaatgagcctggcggcagcggtaactatccgcgtaggttatcgtctgggtcagggcagtacgctggatgcgcaaaccgctgcgcggaccgggcttatggtgggtgtctgtatggcaaccctgacggccattttcacggttagtctgcgggagcaaatcgccctgttgtacaacgacaatcccgaggttgtaacgctggctgcgcatttgatgttgctggcggcggtatatcagatttctgacagtatccaggtgattggcagtgggattttgcgtggttataaagatacgcgttccattttctatattacctttacggcttactgggtgctgggcttgccaagcggctatattctggcactgaccgatctggtcgttgaacctatggggccagcaggcttctggataggctttattattggcctgacgagcgcagccattatgatgatgttgcgtatgcggttcctgcaacgtctgccgagtgccatcattctgcaacgagcatcccgctaataaagacaaggcgcaaccttcacgggttgcgcctgtatttttacgcaggctggagcgttgcgccaatcccgtcttcgtctggctgtaatttcagagcgttacacagagtttgccgactggcatctgttatctcaacgtgtatatccccggtaacttcccctttcacattgatgaagtcaggactaatttcttttgcactggtttgcaggcaaatcgctccctctccgcgcaggcgtttcactttcagttgcacatgcgttgccgcatcagtgatcagccacagttttccaccattcagattgatgttaccaacaatgaaagtgacactgtcaccttttaccgtactgccgtctagaatcaacacaccgccctgctgtacagtaatcgtactttgttgcagctctgcgccataaccaataatcatactagcgccgtccagtaatgcaacactcccggtcagttcaaccggtgcgcgatcttcctctacgacaaaattttcgtccgcgctggtgggactcaacaggatcactgtcccaccttgtattaccgcgttttccagcgtaccggcatgcacttcagcccgaccacccacattcacggacaggttttgcgtcttaccggaactgtagagctgaaggccatccgtccccagacgataaatggatccattctcaacaatagtgtcagagtcttcaccaccgagattattcatggtgccaccagcaagcaacgtatcactggctttcccggccagcataaaaacgccgccctgattaatctcacaattgctggcttccccacctggatacaccaacaattcaccaccttcatctaccacgaccgcactggttgtcccattaaccaacaggccgccctcttgatcgagaatgattttttccgcgcgatgtccttccagtacacgcaggttaccgccattttccagcaacaaaccgcaggcataacctttatcaacgctgaattcaccttcgggatggcggccattaaccgtagcgagcgtagagagactaattgcgcctccctcggactgaacaatatctgtggcaatggcaccatcgctgacgcttagcgtgccattgttaccgtactgtgtgcatttggcgatcccaccggttgccactttcaaccagccagcccccgtgaccacggtattttcggctcttccgccagcttcaacaatcaactcgccttcagtaagttgcgtcgcgccaatgacctcgccggtcttaacaatttgcacgttcccgtcgctcatcaagtttttcgcatcagatcccatgatttattcctttgctgcatctgtgtgcctttattgctacctaagtgtaaaggctacggaggatttatccacgacagatttgagatggtggcaaacaactctgtttaaactctgatacacgaattattgggttgtatcagatgtaaatgcgatcctgaataaaaatcacccttgcaaatcaacaaaatatagccaatttgcttaaaagctctgcaaacggtcgaaatagcgcagaaaattacgttttgcctcttgccaccttcccactctgccgctaatattcgtccccgttgtcacctacaacgttgcgttcatagctcagttggttagagcaccaccttgacatggtgggggtcgttggttcgagtccaattgaacgcaccatcctgcgtccgtagctcagttggttagagcaccaccttgacatggtgggggtcggtggttcgagtccactcggacgcaccagattttcttaatctggtcttctcctttttccctctgtttcttctctgtatccaatacgttaaaagatttacactgtcttcgtatgcgttatcagaaggagaatcgctatggcaactttgttacaacttcattttgcttttaatggcccatttggcgacgcaatggctgagcagcttaaaccacttgctgagagcattaatcaggaacctggttttctgtggaaggtatggacagaaagtgaaaagaaccacgaagccggtgggatctaccttttcactgatgaaaaaagcgcccttgcctatctggaaaaacatactgcccgactgaaaaatctcggcgttgaggaagttgtcgccaaagttttcgatgtcaatgagccacttagtcaaatcaatcaggcaaaactcgcctgacagaatttaatcaagggcggttagcgcccttttcatccctgtctgaaatttctcaaattctaaaaatctcaaccaaacttatctgataacactaaattcgaaagaatgcgtacaggtaagtaacaatgaaaaaaattgctattgtgggtgccgggcctacggggatctacaccttattcagccttctacagcaacaaactccactttctatttctatcttcgagcaggctgacgaggccggtgtcgggatgccatacagtgatgaggaaaacagtaaaatgatgctggcaaatattgccagtattgaaataccgccgatttattgtacgtatctcgaatggctacaaaagcaagaagacagccatctccagcgttatggcgttaaaaaagaaaccttgcacgatcgtcagtttttaccgcgaattctgctgggcgaatatttccgcgatcaatttttacgactagtagaccaggcacgacagcaaaaatttgcagtggctgtttatgaaagttgccaggttaccgatctgcaaattacaaatgctggcgtcatgctcgctacaaatcaggatttacccagcgagacgtttgatttagcggtgatcgccacgggtcacgtctggcctgatgaagaagaagcaacccgaacgtattttcccagcccgtggagtggcctgatggaagcaaaggtcgatgcgtgtaacgtgggtattatgggaacatccttgagcggactggatgcggcaatggcagtggctattcagcatggtagcttcattgaagatgataaacaacacgtcgtttttcaccgcgataacgcaagtgaaaagctaaatatcacgttgttgagccgcacgggtattttacccgaagccgatttctattgccctattccctacgagcccttacacatcgtcaccgatcaggcattaaatgctgagattcaaaaaggcgaagagggccttttggatcgggtatttagattgatagtagaggaaatcaagtttgctgatccagactggagtcaacgcatagccttagagagcctgaatgtcgattcctttgctcaagcctggtttgccgagcgcaaacaacgcgacccatttgactgggcagaaaaaaatctccaggaagtcgaacgcaataaacgagaaaaacatactgttccctggcgttatgtcattctgcgcctgcatgaagccgtacaggaaattgttccacatctgaatgaacacgaccataaacggttcagtaaaggccttgcccgggttttcatcgataattatgcggcaatccctagtgagtctattcgtcgcctacttgccttacgtgaagcgggaatcattcatattctcgccctcggtgaagactacaaaatggaaattaatgagagccgcaccgtcctgaaaacggaagacaacagctacagctttgacgtttttattgatgcccgcggacaacgtccgcttaaagtgaaagatatccctttccctgggctacgcgagcaattacagaaaacaggggatgaaatccctgatgttggcgaagattatacgttacagcaacccgaagatattcgtgggcgcgtagcgttcggcgcgttgccctggttgatgcacgaccagcctttcgttcagggacttacggcatgtgcagaaattggtgaggcgatggctcgggcggtcgtaaagcctgcatcccgtgctcgtcggcgtcttagctttgattaaaggtaaagctatcagcactcaacaaactgatgctgttcattaagacgatagcggactccggctcgaatattgttttcaccttcaatggcgacggcgaagcgaactctttcgccgtcatgatatgccagtgcggcgcttcctcctggcccgagaataatactgtcgaccacgcccgtgctcactaccgtactattttcaccgctggcaatgatgtgtacattgtcgccgctgttggcaattctggcgtttgcgccaaagctggcgatttgcaccaggtcaccattactggcgacatgacaccgttcacccaatgtacaaacgcgtactcgcattccggtattcgcaatccgactgctatctccagcgctgcttatccggctagaattaccggttacagcaacccgtgcgcgttcaccggagctgccaatgtgactgttaaagccgacacttccaatccgcacgctataacccatactggcaatttgcgcggcatacccagcggttgcgattctggcgttatcctcacaacagccgatgcgagcatgatcgtcgctgcgggcaaactgactgcaaaatggtctctctccggggtctgtggccagtttttgcatagaggaaacttcctgatgcgcgaagttttcatccgccagccattttttccacgcatactcaaccagactctccgcccagtccgtatatccttcctcaatcagtgcatgatgaatatcggcataactaccgccgcgtgggaaatggcgcaggaaccagcgatacatcaccgctccgatacgccattctcgcaggtctgcttgtgtaatgatcattcgttagtgccggtgatagccatcgaccatgcttttaaaggtttcgtgtggcgtacgccccgtggtgcaaagataaagatgaccgaagataaaaaagaggcttataaatgccagagcaaaatgtgtctgcaataaccagtatcttacgccaggaaacacatctcccacggcttgcggatagagacacagcagccccgtcaatagtaacaacggcagcaatccatacatgacaccaacataggcgacctgctgtaagggattaaatttagactgggttgttgccgggaaaggatgttcttccccctgcataatgccaaacaaataaaatcgcgtttgttttgccgctcgttccagccacccctgacgacgaatgcgatagtggtgaccattatccccaacggcattgatcagcacaaagccgagccagcatgccagtaacaaaaatccgcaaacttcatgcaccgcaaccagacttttaaccgcagttgcgcccaccatcgcaaagtgatttatcagcccactggccagcaacaatacaaagagtaacgcattgctccagtgccataatctgaccgctttgctgtaaagataaatcttctcaccatgatcggtggcacttttcttcacgccacgagcacgaagcaaggcatgcagccccagcaccaaccacatcccaaccagcaatactccggcaatgatcaaccacaccggccaaaattcgggagtgaactgtggcacatagttcgctaactggctctgaaactgttcagcatgttggctcgggttcatacattttcctttttaatcaaatgttgaccgaaccggcgatacagatgcggtttcccggcaccaggtagctgatattgatagtatttattttgctgcaaccacgcctgaatttctgggctatcttcgcgaccaaagatcaatgcgtgttccgggcaggcgctgacgcaaatgggcggaaagccttttgccagtcgggactcagcgcagaaatcacatttatctgccactttagtgacagggttaaggtagcgaacctggtacggacaagcgccaatgcaataactgcagccgatgcactggcttttttctacccgcacgatcccctgctcatcacgccagctcgcccccgtcgggcaaacgtcgatgcacggagcatcttcgcagtgctgacaactctggcgaaaaaagtgatactgcgtttcgttgtcgttatcggtgactggaatgtgtgctatgcttaaacggcttccctgagcggggacgtggttagttttacggcatgcgcgggcgcaaatattacagccattgcaccgactctcgtcatgaatcatggcataccgaacttccttttcttgcctcgtgttcgctaacagagaagacgcagaaccagtaaaaaagattactgttcccatccccagaacaaatttgcgtcgagtgaaggacatctgattatcccctaatgcagtggctgcaactgtccaccctatccatgacatctccctgaaatttcaggggttctgaaactgctctacctcgaaccattcgcataagccataagccttgccataggtcataaatcgctcgctaaacaagtacaacaccgccgtgctactctccacctgccgtatatcggcatattcaggtgcaacatccatcgcggcgatcgcggcttcaatctgcgcttcctggaagtaatatggcgcttgcatcagcatggcgactttgtaaggacgaggatacgtctggcactcaaaacgaacggcgtgtgcaatggcgcgacaaatgtcctgctccacaacttgcaaagacatcgccgcgtagttttcactcatggcctgcgtactgtaatagtaatcatccttgcttcccgtcaaacaagcgatatccgcgtagtctccgttctgcttaatgctttccagcaaaacactcagttcctcttctgcaaccaaatagggtgggctgagaaacacggcgcgcgccaccagctgcccagccgcagaatgctggcgaatgaactcagccaggatttcagcaggttctggttcggttaccgtatcaacggggtgacgcatcccctgcaaccattgccgcttcgcctcgtcaacttcgctgactttcgctaacggcaattcatcctgatggttcatcttacccattccttacgcaggcagtagattgtgtgctgccagatcggcggcaatatcttccagccccagacgctgcaatgtttcgcgggttggacaaccaagctgtgggtcccagcccatttctttgtagaacatcgtgaggctagcatgcatatcgtcacgatccattttgtcagtaccttcagtaaagaccgggatctgcggatccttgtcgaatacccaggaacagataagatcgtgttcattacgcatatctttggtttgcatcagttttaccgtgtaggcacgatgcaacgtaaaaatacgctctgcagctaaatctaatttttcctgagtcatctcttcgccggtgatcgctttgaagaatttggcttcaagcgccagatcgccccggtaattacggcttttcagcgggctaacggtcattggccagacccagttgcacagggtgacggcgttatgcaaacagacccgcaacaggctccactttgcatatttaatttttgcgtcattgattggcgtgtagtttttggtttcatcgtaagcatcttcagaaccaaaaagttctttcgccacttcacgttgcagtttcaatggcaagccggaaccaataaagttgatatgggtatgcgtcatgcagtcacggttgaacatacagttaacaatggaaccgacctgcgcactcgcttcattggcatggtgaaccggatagccaaacgggctccagagtttatttttcgcgtagccccagtactcttcacccaaattccagcgttctgcgatggcataactaccatcagccaggtgactcagctcacccacacgatgcgccagacggtagtaaaaatctttaatgaagttaacgtcacccgcttccagttgatcccagcgaatttctgcatactcttcagctggcagaacacgcttgaacacacctttgctgtaacaataagtaaagtcgcgatgcaactgcccgtagttacaccataggccgtagtcatcgaacaaattcagacccaccaggttaccaatcacacgaccatcgtctttatcttcaaaatctttcggcccgttcgggaagatggtggtatggacaaagtttgctacacaagtgttaccacctgtgctgggcacgccaaactctttcacccgaggaatattcatttgggtcatacaacggatcgggcaagagtggcagccgctcatttttactgtgtatttctctgccgccggtcctaagtcaaaaacggatttataggtacgaaagccgaccgtattctgattgcctggcggaatttcacccgtttcaatcggaccaccttcagccgcgccccaaaacagccctttacgtgctgtccagcgactcttgggatcactatactctgcccagctttgtggcgtacttggcacgacatggttgttattcgcaccaataagttcagtcatcatgtaatcattgagacgcttcatctcctgacgatcggcaatgttgacccctttcgtcccttcaaccgcaatcgctttcaggtttttgctacccattattgcgccagttcccgcaccgccgctgtggttacggctattcaacatgccagagagaggaacaaggttttccccagcctgaccaatagccgccacacaggtttccggactggtcaatcgacaaatttcttccgtcgttgcgcgcgtcccttttccccataagaaatcggctttttccaggctaactttgtcatctttaatcttcagccataccggacttttcgccttcccttcgataataatgacgtcgtatccagcgaatttcatttgcgctgcaaaaaagccacccatatgggcatcgacgactaaatttcctttggtaaaagtagaaagactggtgatatttacgcgagaactacagggggcaccagatccagttaatgggccggtagcaaagactaatttattcgcttcatcgaaaggtttcgtgcctggcggtacttcgtcatacataattttgtagccgaagcccatgccaccgacaaaacttttaaacttactggaatcttcgagggtaatatttcctgtcgtgagattgactcttaatatattacctgtccaaccgttagccatgattttttcctttgcaagattcacacagtaatatctttccactcgataatttttaacgcccctgttgggcaggcgtttgcgcattcaccgcataacacacatttgctggattttttactttcggtatttacggtggccatcatccacgggcatgccgtagtacaggcgctacagccaatacagcgtttatgatcgacggtaatacagccttctttctgctgccaggtaatcgcaccaatcgggcagacgttcatgcattgcggctctttgcattgacggcaggtgtccgcggtatagttgagatcgccatacaggccgccgccagagccaaccccgttgtcgccaaagaaataattgcgatggattttgatacgggagaagaatgtccctacactgccatcgttgaagttggtacaagagatttcacagcggtggcaacccgtgcatcgcgctcgctgggtcaccagcacccctttgggggtatttatcaaccctactgtgccgctatcaatatcttcctgtttgcaacccaaaagactcagtaacgcaggggcaattgttagaccagcaaggccttttccacttatacgcaagaattctaatcgcgttaagccaatatctaatagtggacgatcaaccgggttcatttatttcgcatcctcttcgcaaacacagtgctgacaattcagcagcctgatattaagcattcaactaatacgctgctgactctgtccccaacaccagatattttccctaacccgatagtgtatgagaaaagattaacgccgataaactaatcctttatggttaggagaaaaaataatgtgattattctgagcccttaacattgatcgttatcaattaaaattacaaagcaagaaattataagtgaactgatatttattatcatttgaaataaatttaacttaagcgacaattatttgtgactttcattgcagaaaataaaaataacattatcgctataaattaaaatacataccgaaattcgtataatttcagcagttgttatttagaatgattaactggaccgcaactgaagcaagaatatcaggatgaagcttaccgcctcatcctgaatggtcattttaccagtgcgttaatgacggtttccatcgcctgcttttccagctcactgcgctgaatgcgtttattggctaatgctgtacgtaatacgcctgcgataacaatatgctttggttcctgccccagatcgcgcatttccagcacaactttaccgacaactctgcacatttctcggtacagttcatcctcttttgtccgatttcccattctttatacctatttatcatgccaactatcagcatatatcaatctaaccaattaaacaaaaatcaaacaaaatcagacaaataacgcgataaattattttaactgtagcaattgagcgatgatatatttatacaccggatgaactttcacttatcctcacactgacaacttcggcaccagacgttgcgcaaacagtgaagtttttgcgtaaccttttccctggaacgttaaatctttgataacaatttattgtctaacaagttgtatattttttgaaacgctgtttttgttttccttttggattaatttcagcgtataatgcgcgccaattgactcttgaatggtttcagcactttggactgtagaactcaacgactcaaaaacaggcactcacgttgggctgagacacaagcacacattcctctgcacgctttttcgatgtcacctatccttagagcgaggcaccaccactttcgtaataccggattcgctttccggcagtgcgcccagaaagcaagtttctcccatccttctcaacttaaagactaagactgtcatgaaaaagaccaaaattgtttgcaccatcggaccgaaaaccgaatctgaagagatgttagctaaaatgctggacgctggcatgaacgttatgcgtctgaacttctctcatggtgactatgcagaacacggtcagcgcattcagaatctgcgcaacgtgatgagcaaaactggtaaaaccgccgctatcctgcttgataccaaaggtccggaaatccgcaccatgaaactggaaggcggtaacgacgtttctctgaaagctggtcagacctttactttcaccactgataaatctgttatcggcaacagcgaaatggttgcggtaacgtatgaaggtttcactactgacctgtctgttggcaacaccgtactggttgacgatggtctgatcggtatggaagttaccgccattgaaggtaacaaagttatctgtaaagtgctgaacaacggtgacctgggcgaaaacaaaggtgtgaacctgcctggcgtttccattgctctgccagcactggctgaaaaagacaaacaggacctgatctttggttgcgaacaaggcgtagactttgttgctgcttcctttattcgtaagcgttctgacgttatcgaaatccgtgagcacctgaaagcgcacggcggcgaaaacatccacatcatctccaaaatcgaaaaccaggaaggcctcaacaacttcgacgaaatcctcgaagcctctgacggcatcatggttgcgcgtggcgacctgggtgtagaaatcccggtagaagaagttatcttcgcccagaagatgatgatcgaaaaatgtatccgtgcacgtaaagtcgttatcactgcgacccagatgctggattccatgatcaaaaacccacgcccgactcgcgcagaagccggtgacgttgcaaacgccatcctcgacggtactgacgcagtgatgctgtctggtgaatccgcaaaaggtaaatacccgctggaagcggtttctatcatggcgaccatctgcgaacgtaccgaccgcgtgatgaacagccgtctcgagttcaacaatgacaaccgtaaactgcgcattaccgaagcggtatgccgtggtgccgttgaaactgctgaaaaactggatgctccgctgatcgtggttgctactcagggcggtaaatctgctcgcgcagtacgtaaatacttcccggatgccaccatcctggcactgaccaccaacgaaaaaacggctcatcagttggtactgagcaaaggcgttgtgccgcagcttgttaaagagatcacttctactgatgatttctaccgtctgggtaaagaactggctctgcagagcggtctggcacacaaaggtgacgttgtagttatggtttctggtgcactggtaccgagcggcactactaacaccgcatctgttcacgtcctgtaatattgcttttgtgaattaatttgtatatcgaagcgccctgatgggcgctttttttatttaatcgataaccagaagcaataaaaaatcaaatcggatttcactatataatctcactttatctaagatgaatccgatggaagcatcctgttttctctcaatttttttatctaaaacccagcgttcgatgcttctttgagcgaacgatcaaaaataagtgccttcccatcaaaaaaatattctcaacataaaaaactttgtgtaatacttgtaacgctacatggagattaactcaatctagagggtattaataatgaaagctactaaactggtactgggcgcggtaatcctgggttctactctgctggcaggttgctccagcaacgctaaaatcgatcagctgtcttctgacgttcagactctgaacgctaaagttgaccagctgagcaacgacgtgaacgcaatgcgttccgacgttcaggctgctaaagatgacgcagctcgtgctaaccagcgtctggacaacatggctactaaataccgcaagtaatagtacctgtgaagtgaaaaatggcgcacattgtgcgccattttttttgtctgccgtttaccgttactgcgtcacgcgtaacatattcccttgctctggttcaccattctgcgcactctctacactaggcgcattgctggctgcgggagttgctccactgctcacgctaaccggataccctgcccgacgatacaacgctttatcgactaacttctgatctacagccttattgtctttaaattgcgtaaagcctgctggcagtgtgtatggcattgtctgaacgttctgctgttcttctgcgcttagtggtcgatgtacttcaacataacgcatcccgttaggctccacggaatatttcaccggttcgttgatcactttcaccggcgttcccgtccgcacgctggagaacaaggctttaatatccggtgcattcatgcgaatacacccactactgacgcgcaaaccgacgctgtccggcgcactggtaccatgaatgaggtattcgccattaccatgcgcgaggcgcagtgcgtaacgtcctagcgggttatttggtccggcaggaacgactggcggtaatttaatgccacgctccaggctacgctgacgaatgcctgccgtaggcgtccaggttgggttagggattttctgcccaacacgcgtttccatcaccggcgtttccagcccctgcaatccaatacctattggataaacctgcacaatattttctcccggcggataataataaaggcgcagctctgcaaggttaacgataatcccctgacgcggtgcatcaggtaataacagttgactaggaatagttatcgtcgtaccaggttttggcaccggggcgatagtgttattggcttcaaggatcaacattgccgcagtatcaaaacgtcgggcaatagcctgaaggtttttatccccttcttgcaccgtatacgtttgattttgcccaaccagtcggcttccggttggtggtagcggataatcaaccgcccaggcagcctggatggcgctaaaagcgccgataagcgtgagtgtaagcaaagacgcgcgtttcattgtaaacctcctgtatttgccggagactcacgctgaaacgtcggatggcgcttatgttcacctgaaaccaaaacactcctgtgcaggtcagtgtaaacattgaccatccggcaatgtgagccaaccggatgaaagctgtccttttagtttagctaagtgcagcggctttggcgcgaattgcgcgaatcatcgcttccagaccttgactacgagatggggtgagatgttgggtgagcgccattttttcaaaccacggacgcacatcgaaattgacaatatcctgcggcgtcatctgatcgtagagaataaagacgaccgcaataagccctttcacaatcgccgcatcgctgtcgccctgtaattcaataattccctgggcattctggcgcatgacaatccacacctgactctgacagccctgaatgctattttgtggacttctgtcttcgtcgcgtaattctggcagacgctggcccagctcaataatgtagagatatttctcttcccagttggcgcagcgtaaaaaattacgcagcaacttttctttatccggcaataaagccatagtgcctccctgttatcccagcaaacggtgaatacgttgcaggccggtcaccagacgatccacttcttcatgggtgttatacatggccaggctcgcccgacacatcgcagggacgttgtaataggccatcaatggcattgcgcagtgatgtccggtacgcacagcaatgccgtaattatcgagaaaactgccaacatcataggcgtggtgtttaccgagattaaaagcaataacgccaagcctgttttgtgggccatagagagtgagatccggtacagattccagctgacttagcgcataatgcatcagattctgttcatactcggctatgttattaagccccagcgcgctaacatactccagcgccgcgccaagaccaatgatgcccccggtattgggtgtaccggcttcaaaccgccatggtgctttggtccaggtagtgccttcactcaggctgacggtggcgatcatagaaccgcccccttcccacggcggcatctcctgcaacaaggcttctttcacataaagaatgccaattccggtggggccatacagtttatgcccggagaacacgtaaaagtcgcaatccagcgcctgaacatccaccggatgatgcatcaccgcctgagcgccatccaccagcacttttgcgccatgctggtgcgcaagcgtgatcatttccgccagtggattttctgtgccaagcacgttggagacatgagtaattgccagcaggcgagttttctcatcaaacagcgtaggcagcgtctccagttgcaacgtaccatcgggattgagcgggatcacacgcagctctgcgccaacgcgtgcgcaaagcatctgccagggaacaatgttagcgtggtgctccatctgactgatgatgatgttatcgcccgcccgcacgttgctgttgccccagctattggcgaccagattgatcccttccgtcgtgccgcggacgaacaccagctcttccgcgctacgggcattaataaacaggcttgcccgcttgcgcacgttctccattttctcggtcgcctgggcgcttaaggtatgaataccacgatgcaccgccgcgtagccatgacgataaaactcggcctcggcgtcaatcacctggctcggtttctgcgcactggcggcgctgtcgagataagccagcggcaaaccgtttacctcacggctaagcaccggaaagtcggcccgcactttgtcgacggaaaaaatcatcttgcacctcctggcagccgttgaccgattcgggccagcacctgctgtttaagcccctcatcacgcagtgcttccgtcagttcggcagcgaaggcgtaaatgatcatctgctgggcatcctgctgattgatcccgcggctgcgcagatagaatatctgttcatcatcaatacgccccaccgtcgcgccgtggctgcatttcacatcatctgcatagatttccagctgcggtttcgtatccacttccgccagtttgcccatcagcagattgttgttggtcatctgaccatccgttttgatggcgtgctgcgcgacgttgatcaaaccgttaaataccgcgcggcctttgtcgctgacgatagttttgtgcaactgtcggctgttacaaaaacctttattgtgttccagccaggtacgggtatcacacacctcgtttttcaccggcatcgccaggctattgatccgcagcgtgctgttttcgccattgagttgcgtactggtgttgtgtcgtaacactgcgccacccagcaggaaactgtggctaaatgcggtggcatcctcagccagcaacaaatcgttatgagcaaagtggtgactgagcgggttttcaaacgccagcttgatatgctgcaagtgggcattcgctgcgacgttgatagtgaaccgtgccccggtaaaatgacgagcatcattcaggctgacaaaatgttcgatcaccgttgcttcggcaccttccgccagatccagatgatgtcggtaatgggcagtgttcacctcttcacctgccacgccctgggtgatatgcattaacagcaatggctttgccggccgttgaccgcgcttcacggcgatatgcgtcacgctttgtgccaggctttccgtcaaatgcagaaacacttccgcctgaatagcgtcgggtaaaccctgacggtcgtcgttaatgctcacttcatatccgctgccttcagttgcatcgctcagtgcgggcacgtaacgcccatcgacaaacaccagccgcacggagtctaacgttaacgctaaggcattacgctgctgtggggatatctctcccgcaatgctgacaaactggctattgatcagcccttccagcggcgtatatttccagttttcatgtttacgtgtcggcagtccggtacgcagcaattgttgtaaatgctgctgtgcttgcggggagcgttttgtcccttcagcttcaaacaagtgatgccactgttgcagcgcgttactgctgttcggtaagccagccataaccctgctcctccagttgtttgaccaacgtgaaatcgccggatttcacaattcgtccctgatatagcacatgaacgtaatcaggcttgatgtagtcgagaatgcgttggtagtgcgtaacaatgatgaaactgcgcttgccatcacgcaggctgttcacgccatcggcgaccacttttaatgcgtcaatatccagcccggagtcgctctcatcaagaatgcataactccggttccagcaccgccatttgcaaaatatcgttgcgctttttctcgccgccggaaaaaccaacgtttacgctacgggttaataaatcttccggcatcttcaggagagcgattttctcttccatcaaatcctgaaaatcaaagcggtcgagcgtttcctggccgcgatagctgcgcaccgcattaagtgccgtttgcaggaaaaactggttactgacacctggaatctccaccggatactggaaggccataaagatgccttcgcccgcgcgatcttccgggctcagcgcaagcaaatctttgcctttgaactcaaccgtgccgcccgtcacttcataatcttctcgcccggcaagcgttgcgcttaaggtacttttgccgctaccgtttggccccataatggcgtgaacttcgccgggatgaacgtcgaggcttaatccgcgcaggatagctttatcttccacgctgacgtgtaaatctttaatacttaacatgtttattccttatccgacgctgtgttcaagactgatggcgaggagtttttgtgcttcaacggcaaattccaacggcagctcgctgaacacgtctttgcagaaaccgttaacaatcatgctgatggcgtcttcttcgctgatcccgcgttgcaggcagtaaaacagttgatcttcaccaatacgacttgtcgttgcctcgtgttccagttgcgcactattgttacgacactcaacatacgggaaggtatgcgccccacaattagcgccaatcagcatactgtcgcactgagtgaaattgcgcgcattggttgccgtcggcatgattttcactaagccgcgataactgttctgactatgtccggcagagatccctttgctgataatggtgcttttggtgtttttaccgatgtggatcatcttggtgccggtatccgcttgctgatgaccgctggtcagcgccacactgtaaaactcaccaatggagttatcgccgcgcaaaatgcagctgggatatttccacgtaatcgcactcccggtttcactttgcgtccaactcattttgctgttttcgccttcgcacaaagcacgcttggtgacgaagttgagaataccgccggtgttgttatcgccaggaaaccagttttgtaccgtggaatatttcacctcggcgtttttatggatgatgacttccaccactgccgcgtgtaactgatagctgtcacgcaccggagcggaacagccttcaatgtagctgacgtagctgtcttcgtcggccaccagaatggtgcgctcaaactgcccggttttttctgcgttaatgcgaaaataggtggaaagttccatcgggcagcgcacgcctttaggcacataaataaacgtaccatcagaggctaccgccgcattaagcgcggcaaagaagttgtcattccccggcaccacggtgccgagatatttacgcaccagttccgggtgatcgtggatcgcctcaccaaaggaacagaaaataattccctgctccgccagtttttcgcgataagtagtggcaacgctaacactgtcgaaaatggcatccaccgccacctctttgccttcccgcacgggaacgcccaactgctcaaacgccgcctccacctctttacttaaaaaggcgttcgcgccagtttgctgcaccgcgccaggttcagacgcgcaagtgtcgtcacaattaccgcagcttggtgcactgtagtagctgtaatcctgataattcagcttgtcgtagtgcgctttcaaccagtgcggttcttccatctccagccatgcgcgataggcgtttagacgaaactccagcatccactccggctcattacgcttcgcgctaattgcgcgcaccacctcttcgtttatcccctttgccagctcatcggtggctaactgggtgaagaatccttctttataattcagcgggccgccggtccaggttttgacatcgtcagttgcttcagtattacgagacatagtaccgcttataccccaaagctttcgccacagccacattcattctgggctttagggttgtgaaatttgaatatctgattaagtccttcacgaacgaaatcgacttccgtgccatcaataaacggcatcgcttgcagcgggacaaacagcttcgcgccgtcgtgttcaaacagcagatcgtctttgtccggctcgctaacactgtcgagcacatagccaaagcccgcgcagcccgtttgcttcacgcctaagcgcacgccgaccatacccggctgctttgccaccagctcacggatgtgtatcgccgctgcgggtgtcagcgttaagccttgccaggcgaaatcttgtgggttaaaggttccactatgcatgtccatcgatttacctcacttcatcgctttcagcgtataacagcatgttagtgataatgattatcagttcaacccagcaaacgcaggggctttaccgtaaaacatgctttttgcctgcttttaataagcatagaccctgatgtgtgggttaacaggcacgctaagaattaggtatctcattgttagataatggttattatctaaggagcattaaggctgtgatgaaaaagaaaaagttgtattgaaaatgactatttaagagataggtaaaaaagtgcagcgttcagaaataagaaaacccttaagtctgtgcgacacaggcttaagggtttctaccccatccggcgcttatctccggcactctcagtggcttagctcttgaaggggcgataagaataatctcataaagctaacccgccgttttaacacaaactgcgattagtattatttttgaacaatatcaggcggtagataagcagtattaagaaggtcatcgaacctggacggaggttaatccaggtcgatttggcgaacttgcggcattaagtcaggatcaatgcacgcccagacgccaggcaaagtagatttcttcttttaattcagcagaagagagagtaagcaggtcagcaaattcaagttctagttgtttcagacgtttgagatattgggcaggactaagattgctctggtcacggcgtaaaaattcaatggccagctgggtgggatcaagttgagtagacatagcatcctcgcttttagacaagacctgcacagtataccaccgtttactgtgcagataatgaccaaaagcaatatgcgtcacacttttctggtgacaacgtcacaaaatggcggtcgtcaatcgactgctacagcacaaacgccctttctcatcgaagatttcaatctgccagacctggtgacggctaccgagatgcaacggtttgcatacgccgcgcacccgcccttctcgtgcgctgcggacgtggttagcattgatttccagaccaaccactttttgctcaccttcggtacataaataaccggcaacggaaccgatactttcggccagtaccacggatgctcctccatgcagcaacccgaaaggctgctttgtccggctgtctactggcattgtcgcttcaagggtgtcatcaccaatatgttcaaagcgaatatccaggaaccccaccatgtttccttcacccatagcattcagtgcttccagggtgattttccgtttccatatcatttaataatctccagtaaagcctgcacaggatggcgtacccccgtgccttcaacccgttttacctggctacggcaggaatatccggtcgccagacagcggttacgcggcagtcgctgcatagcctgatgccaggataactcatagatcccgaggctattttcatggtttttcgcttcatgtccgtaagtccctgccatgccgcagcaacccacgctgacattttccagtttcgcgccaaaacgggcaaatatcgcggcccattgtgctggcgcacccggcaaggcggtaacttcggtacagtgaccaaagaaataccaactttcaccgctgactgtagccactggctgactctcaagtgcgcttgccagccattcattcgccagtaagacgttaaactcgccacgctcctcgcccagcgccagtttatattcatcgcgataacaaagtaccagcgccggatcgacgcccaccattggcatacccagcttcgccatacggttgaggaaatccgccgtctttttcgccgtcttcgcaaaacgattaagaaaacctttaatatgctgggctttgccatttgggctaaatggcagtaacacaggctggaaacctaatttttcgaccagacggacaaaatccgccaccacttgcgcatcgtaatagctggtaaaggggtcctgcaccaccaacactgtgcgcgctttctgctctgcattgagagattcaagctgttccagcgtcatgtttgcgctgcgatgccccaccatttgttgttgtaggctggggacgctcagcagcggcaaatcaaccatgccgatatgtttttcgctgagtttgcgcaccagcggctggttaatgaagaagttaaaggttttcggcgcgcgtgccatcagcggcgcgtagctctcgaccgtagcgacgaggtggtcgcgcagcgggcgtaaataacgggtgtgatagagctgcagaaaacgagagcgaaactccggcacatcaattttgatggggcactgggtgctacacgctttacaggccagacagccgctcatcgcctctttgacttcgtgactgaagtcatattcgcctttattcgcatgccagctattgcgcgtgcgggcaattaacgtccgcaaactgacgccggattcaggcagttcttgttccagtttgagtggatcaacgccgcgatccgccaacaaacgcagccattcacgcaccagcgttgcgcgccctttcggactatgaatccggttctgggtgatcttcatgctcggacacatcggactacgggcatcaaagttgaagcataaaccgttgccgttacactccatcgcaccgcgccactgctggcgtaccgcaatggggatctgccgatcgaatgtaccgcgcttcaccgcgtccactttcatcatcggcgcatcgagaccttctggcgggcaaatcttccctgggttgagtcggttatgcgggtcaaatgccgctttcactttgcgcagttctgcaaaaagttcctcaccgaaaaacgccgggctgtattcagcgcgaaaacctttgccgtgctcgccccacaacaaaccaccgtatttcgcagtcagcgccaccacgtcatcagagatttgcttcatcaaaatctcttgttgaggatcgcacatatccagcgctggacggacgtgcaagacacctgcgtcgacgtgaccgaacataccgtagcttaagccgtggctgtcgagcagcgcgcgaaattcagcaatataatccgccaggtgttccggcggtacgcaggtatcctcagcaaacggaattggcttagcggcacctttggcattgccaagcagaccaacggcttttttgcgcattgcatagatacgttcaacccccgccagctcacggcacacctgccagccgatgacacctgcttgatgactggcgatcagctcatccaaccgcgcacagagtgcatttacccgctcatcaatcagcgcctcatcatcaccagcaaattccacaatgttcagcccgagcatctcttggtcaggcacatcggtaatcaactcgctgacggaatgccagacaatatcttcccgcgccagattcagcactttactgtccaccgtctctacgctaagcgcccgcgcctcaaccataaacggcgcgttacgcagcgcagagtcaaaagagtcatatttgacgttcaccagacggcgcactttaggcaagcgtgtaatatccagccgcgcttcggtaataaaggccagcgtcccttcactacccgtcagaatgcgcgtcaggtcgaactcggtcatctcatcgttaaagacatgacgcagatcgtaaccggtaagaaagcggttaagtttggggaagttgtcgataattaactggcgttgctgacggcaacgttgataaaccgtgttataaattcgcccgattgtggtattggatttacccagcgtttccgccaattcgacgggtaaaggttgcgtatcgagaatatcgccccccaacaacaccgcgcgtacgccaagtacgtgatcactcgttttgccatagaccaggcttccctgaccggatgcatcggtattgatcatcccaccgagcgttgcccggttgctggtgctaagttccggcgcaaaaaagtagccgaacggtttcaggtactgattgagttgatcttttatcaccccggcctcaacgcgcacccagccctcttcagggttaatttcgatgatgcggttcatatggcgggacatatcaacaataatcccctggttgagcgcctgaccgttagtgccggtgccgccgccgcggggggtaaagatcaggctactatagcgttcctgcgcggcaagacgggcgatcagcgccacatctgcggtactacgcggaaataccaccgcatcggggagaagttggtaaatactgttgtcggtgctcattgtcagacgatcggcataacttgtcgccgtatcgccggtaaaaccttgttgctccagctcttgcaaaaaattaagcaccagttgaacgacgccgggtgcctgggaaatctgtggaatcattatattgaccctttcctgcggtctgtgatgtaggtcgatacactattctttcaggctgctgcaatagcgcactgaaaggtgatgtttgtttactctatggatttcgtgttgcaggaaggcggcaagcgagtgaactccaggagcttacaatagtaagtgactggggtgaacgaacgtagccgcagcacatgcaacttgaaatacgacgagtaaatcgtttgcgtgttgcctgagttgttgtaccacatttttttctaacacgcccatcagaattaagggcagaatcggcctgttaaaaaccgctgaaattgctcatcattatgcaggtgagtttcgcgtgttcacgtcgcgtcgacgatttgacgcacaaaaaaggtgaaaagtagttatggtaaatgttcgtcagcccagggatgtcgcacaaattctgcttagcgtgctgtttttagccatcatgattgtggcatgtctgtggattgttcaaccctttattctcggctttgcatgggccggtacggtggttatcgccacctggccggtattgttacgtttgcaaaagatcatgtttggccgccgctctctcgccgttctggtgatgacgctgttattagtgatggtgtttatcatccctattgctttgctggttaacagtatcgtcgacggcagcggcccgctaattaaagccatttccagcggtgacatgacgttacccgatctggcgtggcttaataccattccggtgattggcgcgaagctgtatgcaggctggcacaacttgctggatatgggggggacggcgatcatggcgaaagtccgcccttatattggcaccaccaccacctggttcgttgggcaggcggcgcatatcgggcgctttatggtgcattgtgcgctgatgcttctcttcagtgccctgctgtactggcgcggtgaacaggtggcacaaggcattcgccattttgcaacccgtctggcaggcgttcgcggagatgccgccgtgctgctggcggcacaggctatccgcgcggtggcgctgggtgtggtggtgacggcgttagtacaggcagtgcttggcggtatcggcctcgccgtatccggcgtaccttatgcaacgttgctaacggtgttaatgatcctctcctgccttgtccagcttggcccgttgccggtactgattccggcgattatctggctctactggactggcgataccacctggggaacggtattgttagtgtggagcggtgtggttggcacgctggataacgtcatccgcccaatgttaattcgcatgggtgccgatttaccgctgatcctgattctctctggcgttattggtggtttgattgctttcgggatgatcggtctgtttattggtccggttctgttagccgtttcctggcgtctgtttgccgcgtgggtggaagaagtcccgccgccgacggaccaaccggaagaaattctcgaagaacttggcgaaatcgagaaaccgaataagtaatttctcatcaggcggctctgccgcctgattgttaaccaccgctaattgatatttgcttgctcttccccatattttcctgcttaccgccattcagctggtagtacctgtcgcaaattctttacagtttttaaactaatgagacgaatctgatcgacgcaaaaagtccgtatgcctactattagctcacggttataaatcaacatattgatttataagcatggaaatcccctgagtgaaacaacgaattgctgtgtgtagtctttgcccatctcccacgatgggcttttttttaacatttttccgcttcgctacctcgcccctcactctttccaataatgttgcacaagatactgtgactctcttcaagccgtcagcaggctgataatgttatttatattttattgtttatttcatgcagccattacacgatgaacgcttatgaactccaggcactccgccatatttttgccatgactattgatgaatgcgcgacctggattgcccagaccggtgacagtgaaagctggcgtcagtgggaaaatggcaagtgtgccattcctgatcgtgtagtcgagcaactgttggctatgcgtcagcaaagaaaaaaacatcttcatgccatcatagagaaaataaataaccgcatcggcaacaacaccatgcgttttttccccgacttaaccgcatttcaacgagtctaccctgatggcaattttattgactggaagatctatcaaagcgtagctgctgaattatatgcacacgatctggagcggctttgttaatttttccacagaaaggaattgtcgttgttacaacaataatgaacggatgctgacacaacatcgcttcactttttaaagcacctttgctaagtagaacctatgaaaaatccctatttccctaccgcacttgggttgtattttaattacctggtgcatggtatgggcgtccttttgatgagcctgaatatggccagcctggagacactttggcagactaatgccgcgggtgtcagcatagttatcagtagcctgggcattggtcgattaagtgtcttgctttttgcaggattattatccgatcgctttggtcgccgcccttttatcatgctcgggatgtgctgctatatggccttcttttttggcatcctgcagaccaataacatcattatcgcttatgtttttggctttctggcgggaatggcaaacagttttctcgatgcaggcacttatcccagtttgatggaagcttttccacgcagtcctgggacagccaatattttaattaaagcatttgtttccagcggacaatttttattaccgctaatcattagcctgttagtgtgggctgaactgtggttcggttggtcctttatgattgctgcaggcattatgtttattaacgctctgtttttataccgttgtacgttcccaccccatccgggtcgtcgcttacctgtcataaagaaaaccaccagctctacggaacatcgctgtagtattatcgatttagccagttataccttatatggctatatcagtatggcaacgttttatctggttagccagtggctggcacagtacggacaatttgttgcaggcatgagttacactatgagcatcaaactactcagtatctacaccgtgggtagcctgctttgtgtatttattaccgctccactcattcgtaataccgttcgcccaacaacattactgatgctgtacacctttatcagttttattgctctgtttaccgtctgcctgcatcccacattttatgtggtgataatatttgcttttgtcattggttttacctctgctggaggtgttgtgcaaattggcctgacgttaatggctgaacgtttcccttacgctaaaggtaaagctacagggatctattacagtgcgggcagtattgcgacctttactattccgttgattacggctcatctgtcccaaagaagtattgccgatattatgtggttcgataccgccatcgctgccatcggttttttactggcactgtttatcggcttacgcagccgcaaaaaaacgcggcatcacagcctaaaggaaaatgtcgctccgggtgggtaatgcaatattcttttcaggtcatgcaagatcttacggataaataactctttctgcgctaactaaggaaaatcgcgatcaaaaacaaactatgacatgcaatattcctggaaacataaactttatgccatgtacccagggaaaatcatcttcagtatagtaattatgtaaaccgtcggagaacaatacgtacggtaacgaaattatctttcagcaaggagctgtgaaaatgtctcaaaataaggctttcagcacgccatttatcctggctgttctttgtatttacttcagctacttcctgcacggcattagtgttattacgcttgcccaaaatatgagttctctggcggaaaagttttccactgacaacgcgggcattgcctacttaatttccggtatcggtttggggcgattgatcagtattttattcttcggtgtgatctccgataagtttggtcgtcgggcggtgatattaatggcagtaataatgtatctgctattcttctttggtattcccgcttgcccgaatttaactctcgcctacggtctggcagtgtgcgtaggtatcgctaacagtgcgctggatacgggtggctaccccgcgctcatggaatgctttccgaaagcctctggtagcgcggtcatactggttaaagcgatggtgagttttgggcaaatgttctacccaatgctggtgagctatatgttgctcaataatatctggtacggctatgggctgattattccgggtattctatttgtactgatcacgctgatgctgttgaaaagcaaattccccagccagttggtgggcgccagcgtaactaatgaattaccgcaaatgaacagcaaaccgttagtctggctggaaggtgttagtagcgtactgttcggtgtagccgcattcagcaccttttatgtgattgtggtgtggatgcccaaatatgcgatggcttttgctggtatgagtgaagctgaggcattaaaaaccatctcttattacagtatgggcagcttggtctgtgtctttatttttgccgcactactgaaaaaaatggtccggcccatctgggctaatgtatttaactctgcactggcaacaataacagcagccattatctacctgtacccttctccactggtgtgcaatgccggagcctttgttatcggtttcagtgcagctggcggcattttacagctcggcgttagcgtcatgagtgagttttttcccaaaagcaaagccaaagtcaccagtatttatatgatgatgggtggactggctaactttgttattccactgattaccggttatctgagcaacatcggcctgcaatatatcattgttctcgattttactttcgcgctgctggccctgattaccgcaattattgtttttatccgctattaccgcgttttcattattcctgaaaatgatgtgcggtttggcgagcgtaaattttgcacccggttaaacacaattaagcatagaggttaaaggagttaattatggatgttaccgcaaaatacgaattgattgggttgatggcctatcctatccgccacagtttaagccccgaaatgcagaataaagccttagaaaaagcgggattgccatttacctatatggccttcgaagtggataacgatagctttcctggagcaattgaaggattaaaagccctcaaaatgcgcggaactggtgtaagcatgccgaacaaacaactggcgtgtgaatatgttgatgaattaacaccagctgccaaactggtgggggccatcaacaccatcgttaatgatgatggctatctgcgtggctataacaccgacggcacgggccatattcgcgccattaaagagagcggttttgatatcaaaggcaaaacgatggtgctgttaggggccggtggtgccagtacggcaattggcgcgcagggggcaattgaaggtttaaaagaaattaaactctttaaccgtcgggatgagttcttcgataaagccctcgccttcgcgcagcgggttaatgaaaacaccgattgtgtcgtcacggtcaccgatctcgccgatcagcaagcctttgctgaagccctggcttccgccgacattttaaccaatggcacaaaagtgggtatgaaaccccttgagaatgaaagtttggttaatgatatcagtctgttacatccgggacttctggtcactgaatgcgtgtataacccgcatatgacgaagttattgcagcaggcgcaacaagctggttgcaaaacgattgatggatacggcatgttgttgtggcaaggggctgaacagttcacattatggactggcaaagatttccctctggaatatgttaaacaggtcatggggttcggtgcctgacaggctgaccgcgtgcagaaagggtaaaaaatgaaaaccgtaactgtaaaagatctcgtcattggtacgggcgcacctaaaatcatcgtcagcctgatggcgaaagatatcgccagcgtgaaatccgaagctctcgcctatcgtgaagcggactttgatattctggaatggcgtgtggaccactatgccgacctctccaatgtggagtctgtcatggcggcagcaaaaattctccgtgagaccatgccagaaaaaccgctgctgtttaccttccgcagtgccaaagaaggcggcgagcaggcgatttccaccgaggcttatattgcactcaatcgtgcagccatcgacagcggcctggttgatatgatcgatctggagttatttaccggtgatgatcaggttaaagaaaccgtcgcctacgcccacgcgcatgatgtgaaagtagtcatgtccaaccatgacttccataaaacgccggaagccgaagaaatcattgcccgtctgcgcaaaatgcaatccttcgacgccgatattcctaagattgcgctgatgccgcaaagtaccagcgatgtgctgacgttgcttgccgcgaccctggagatgcaggagcagtatgccgatcgtccaattatcacgatgagcatggcaaaaactggcgtaatttctcgtctggctggtgaagtatttggcagcgcggcaacttttggtgcggtaaaaaaagcgtctgcgccagggcaaatcagcgtaaatgatttgcgcacggtattaactattttacaccaggcataagcaataatatttcggcgggaacaccctccccgccgaactaaaaaatatattcaatcgtatttaataaaaatatttcgtgagtctctgtgcgctaattctccatttggcgtagggaaaatcacatctgaatcaggaattaacaatgaaacctgtaaaaccacctcgtattaatggacgagtgccggtcctgagcgcacaggaagcggtgaattatattcccgacgaagcaacactttgtgtgttaggcgctggcggcggtattctggaagccaccacgttaattactgctcttgctgataaatataaacagactcaaacaccacgtaatttaagcattattagtccaacagggcttggcgatcgcgccgaccgtggtattagtcctctggcgcaagaaggtctggtgaaatgggcattatgtggtcactggggacaaagcccgcgtatttctgaactcgcagaacaaaataaaattattgcttataactacccacaaggtgtacttacacaaaccttacgcgccgccgcagcccaccagcctggtattattagtgatattggcatcgggacatttgtcgatccacgccagcaaggcggcaaactgaatgaagtcactaaagaagacctgattaaactggtcgagtttgataacaaagaatatctctattacaaagcgattgcgccagatattgccttcattcgcgctaccacctgcgacagtgaaggctacgccacttttgaagatgaggtgatgtatctcgacgcattggttattgcccaggcggtgcacaataacggcggtattgtgatgatgcaggtgcagaaaatggttaagaaagccacgctgcatcctaaatctgtccgtattccgggttatctggtggatattgtggtggtcgatccggatcaaacccaactgtatggcggtgcaccggttaaccgctttatttctggtgacttcacccttgatgacagtaccaaacttagcctgcccctaaaccaacgtaaattagttgcgcggcgcgcattattcgaaatgcgtaaaggcgcggtggggaatgtcggcgtcggtattgctgacggcattggcctggtcgcccgagaagaaggttgtgctgatgactttattctgacggtagaaacaggtccgattggcggaattactagtcaggggatcgcctttggcgcgaacgtgaatacccgtgccattctggatatgacgtcccagtttgatttttatcacggtggcggtctggatgtttgttatttgagttttgctgaagtcgaccagcacggtaacgtcggcgtgcataaattcaatggtaaaatcatgggcaccggtggatttattgatatcagtgccactagcaagaaaatcattttctgcggcacattaactgcgggcagtttaaaaacagaaattaccgacggcaaattaaatatcgtccaggaaggacgggtgaagaaatttattcgggaactaccggaaattactttcagcggaaaaatcgctctcgagcgagggctggatgttcgttatatcactgagcgcgcagtattcacgctgaaagaagacggcctgcatttaatcgaaatcgcccctggcgtcgatttacaaaaagatattctcgacaaaatggatttcaccccagtgattagcccagaactcaaactgatggacgaaagattatttatcgatgcggcgatgggctttgtcctgcctgaagcggctcattaacaggagtataatgatggatttttctttaactgaagaacaagaactgctgctggccagtattcgcgaactgattacgactaactttccggaagagtatttccgcacctgcgatcaaaacgggacatatccgcgtgagtttatgcgggcgctggcggataacggtatttccatgcttggcgtgccggaagaatttggtggtatccctgcggattacgtcacccaaatgctggcgctgatggaagtgagtaaatgcggtgctccggcatttttaattaccaacggtcaatgtattcacagtatgcgccgtttcggttctgcagagcagctacgtaaaacggcagagagcaccctggaaacgggtgatcccgcctatgccctggcgttgacggaaccaggtgctggcagtgataacaacagtgccactaccacttacacgcgtaaaaacggcaaggtctacatcaacggacaaaaaacctttattaccggtgcgaaagagtacccgtatatgctggtgctggcgcgcgatccgcaaccgaaagatcccaaaaaagccttcaccctgtggtgggtcgactccagtaagcccggcattaagattaacccgctgcataaaatcggctggcatatgctcagcacctgcgaagtctatctcgacaacgtggaggttgaagagagcgacatggtgggcgaagaaggaatgggtttcctcaatgtgatgtacaactttgagatggagcgcctgatcaacgccgcgcgcagcaccggctttgccgaatgcgcctttgaagatgccgcccgctatgccaaccaacgtatcgcttttggtaagcccattggtcataaccagatgatccaggaaaaactggcgctgatggcgattaagatcgacaacatgcgcaacatggtgctgaaagtggcatggcaagccgatcagcatcagagtctgcgcaccagcgcggcgctggcaaaactgtactgtgcacgtaccgcaatggaagtcattgatgatgcgattcaaatcatgggcggtctgggctataccgatgaggcgcgcgtctcccgcttctggcgtgatgtccgttgtgaacgtatcggcggcggtacagacgaaattatgatttacgtagcaggtcggcagatcctgaaagactatcagaacaaataatctgcaggcggcgcagcttcttaacaaactgcgccgccagatttatccaacaagacttaccggttgaggaaattcagataggatttcttgttccgcaaaacagtttttaaattgtctacggtaatcgctggggctacaaccgacatggcgcaaaaacagtttggcaaagtgatcgacattttcataacccacacgccaggagatctctgcctgacttaattcagtattagtgagactccattttgcttccgtcatacgccgttgaataacatagttaataggggaaatacgatactctttggtaaattcatggcaaatataactgacgctggcacgaaattttttgcttaactgttctaaagtgattttttcgcgataattattattcagatagaaaagaatatcttttatcagaacatcttttttaatatacccctgctcgctacgataagcatttttaaaattttcgtagtaaagaatggctaacgtataggcaaatgcatcccataagctagatgtttggctatttttactttgcggcaaaatcacacttagctcattaaataaggtttttatgacttcttttccctgccccgcggcaattaccggacaagaatgcggttgcagtagctgattttcctcagccccctgaaactgaaagccgtacagcgcacaggtacacgtcgttgccggatcgttaacgtcagaggccaccgcatgcagcctgccgcgttctatcaccacaatgtcatccgcatgtgcgacatataagctagaatcgatggtaaaccttgcaacccctttcttgacgtaaatcaactcggtttcattgtcatgaacgtgatgtccggactcccattttggatcatcgctaaatgcaaaacgactaagccgtggcgttttaccggcgacaaacagcgtttcactggcgttatcaaaacagcgttgatacatgacaacctccctattccatgagcaagcaaaaacaatatatgccggataaaatacggcgtgtattgcggttatacaaccgcgtttagcgagagctaaacaagattatttacactgaatgcaagattgtacggtcatggaataactatattgccgcaaattgcacttttgttttagcgatcgcattttttttgcaagattgttggcaaggaaaacagcttgctccgtcgaaaaccccgcaccgctatcgcacactattttcaggccatttttaccttccatcggagatggttccgtatgcgactcacaggagaaatcatgaaaataataacctgctttaagctggtgcctgaagaacaggacattgttgtcactccagaatacaccctgaatttcgacaatgccgacgccaaaatcagccagttcgatctcaatgccattgaagctgcaagccagctcgcaacagatgacgatgagatagccgcgctgaccgttggcggcagtttgttgcagaacagcaaagtgcgcaaagacgtgctatcccgcgggccgcacagcctgtatttggtgcaggatgcgcaacttgaacatgcactgcctctcgataccgcaaaagcgctggcggcagcaattgaaaagatcggcttcgatttactgatctttggtgaaggttccggcgacctttatgcccagcaggttggcttgctggtcggagaaattctgcaacttccggtgattaatgcagtgagtgctattcagcgtcagggcaatacactggtgattgaacgcacgcttgaagatgatgttgaagttattgaactctctgttccagccgtgctctgcgtcacctccgatattaacgtgccacgcattcctagcatgaaagccattctcggcgcgggtaaaaaaccggtaaatcagtggcaggcaagtgatattgactggagccagagcgcgccacttgctgaactggtcggcattcgcgtaccgccgcaaacagaacgtaagcacatcattatcgataacgatagcccggaggccattgccgagctggcggaacatctgaagaaagccctgaactgaagcctacggagaagaaacgatgagtcaattaaacagcgtctgggtctttagcgataatcctgaacgttatgctgaactgtttggcggcgctcagcaatggggccaacaggtgtatgccattgtacaaaataccgaccaggcgcaggcagttatgccttatggtccaaaatgtctttatgttcttgcgcaaaacgacgcgctgcaacgcactgaaaattacgccgaaagcattgctgccctgctgaaagataaacaccccgctatgttgctgttggccgcgacgaaacgtggtaaagcgctggcagcacggttaagtgtgcaactgaatgcggcgctggtgaacgatgccacggcggtggatattgtcgatggtcacatttgcgccgaacaccggatgtatggcgggttagcgttcgctcaggaaaagatcaacagcccgctggcgatcattacccttgcacccggtgttcaggaaccgtgcaccagtgatacctctcatcagtgcccgacagaaacggtaccttatgttgctccgcgtcatgaaattctctgtcgcgaacgccgtgcgaaagccgcaagcagcgtggacctgagcaaagcaaaacgtgtggttggcgtcggtcgtggactggcggcgcaggatgacctaaaaatggtccacgaactggcggcggtgctgaatgctgaagtcggctgtagtcgtccaattgccgaaggcgagaactggatggagcgtgaacgttatatcggtgtctccggcgtgttgctgaaatccgatctctacctgacgctggggatctccgggcagatccagcatatggttggcggcaacggcgcaaaagtgattgtcgccatcaataaagataaaaatgcgccaatcttcaactatgccgactacggtctggtgggcgatatctacaaagtcgtccctgccctgattagccagttgagccgctaattcccctttcaaccacatctcccgctgtaaacgcagcgggaagggagcataacgcatgagcgatgacaaatttgatgccattgtggtcggtgcgggcgttgctggtagcgttgccgcactggtcatggcacgagccgggctggatgtcctggtgatagaacgcggcgacagtgccggatgtaaaaacatgaccggcgggcgtctttatgcccacacacttgaagcaatcattccaggctttgcagtaagtgcgccggtagaacgcaaggtcacacgcgagaaaatctccttcttaaccgaagaaagcgccgttaccctcgattttcaccgcgagcagccagatgttccgcaacacgcatcttataccgtattgcgtaatcgtctggacccgtggttgatggaacaagccgagcaggcgggcgcgcagtttatcccaggcgttcgcgtcgacgcgctggttcgtgaaggaaacaaggtcactggcgtgcaggctggggatgatattctcgaagcgaatgtggtgattctggctgatggcgttaacagcatgcttggccgcagcctgggaatggttcccgcttccgatccgcatcattacgctgttggtgttaaagaggttattggcctcacaccagaacagatcaacgatcgctttaatattacgggcgaggaaggtgccgcctggctgtttgccggttccccttctgacggcctgatgggcgggggatttctctataccaacaaggattccatatccttggggctggtttgtggattgggtgatatcgcccatgcgcaaaaaagcgtgccgcaaatgctggaagattttaaacaacaccccgccattcgcccgctgattagcggcggcaaactgcttgaatattccgcgcatatggtgccggaaggcggtctggcaatggtgccgcaactggttaacgagggcgtgatgatcgttggtgacgccgcaggcttctgcctgaatttgggttttacggtccgcggcatggatttagccatcgcaagcgctcaggctgccgccacaacggtgatcgccgccaaagaacgcgcggatttctccgccagcagtctggcgcaatacaaacgtgagctggaacaaagctgcgtcatgcgtgatatgcagcattttcgcaagatcccggcgctgatggaaaacccgcgcctgtttagccaatacccacgaatggtagccgacatcatgaacgagatgttcaccatcgacggcaaaccaaaccagccggtacgaaaaatgatcatgggacatgcgaagaaaattgggctgatcaacttgctgaaagatggcattaagggagcaaccgcgctatgagccagaacgctacggttaacgtcgacatcaaattaggcgtcaataaattccatgttgatgagggccacccgcatatcattctggcggaaaatcccgatatcaatgaattccataaattaatgaaagcctgccctgccggactttataagcaggatgacgcaggaaacattcattttgattccgccggttgtctggagtgcggcacctgtcgggtgctgtgcggtaacactattctcgaacagtggcaatatcccgcaggcaccttcggtattgattttcgctacggctaatcatgcatcccacaggcccgcatctcgggcctgatgttctgtttcgagagtccaacatgaaagtgacattaacgtttaacgaacaacgtcgtgcggcgtatcgtcagcaagggttatggggcgatgctagcctggccgattactggcagcagaccgctcgtgcgatgccagacaaaattgccgtggtcgataatcatggtgcaagctacacctatagcgcgctcgatcacgccgcgagctgtctggcaaactggatgttagcgaagggtattgaaagtggcgatcgcatcgcatttcaactgcctggctggtgtgaatttaccgttatctatcttgcctgcctgaaaatcggtgcagtttccgtgccgctgttgccttcctggcgggaagcagaactggtgtgggtgctcaataagtgtcaggcaaaaatgttctttgcaccgacgttgtttaaacaaacgcgtccggtagatttaatcctgccgctgcaaaatcagcttccacaactacaacaaattgtcggcgtggacaaactggctcccgccacctcttccctcagtttaagtcagattatcgccgacaataccagtctgaccacggcgataacgacccacggcgatgaattagctgcggtgctgtttacctccggaaccgagggtctgccaaagggcgtgatgctaacgcataacaatattctcgccagtgagcgggcttattgcgcgcgactgaatctgacctggcaggatgtctttatgatgcctgcgccacttggtcacgcaacgggctttctgcatggcgtaacggcaccattcttaattggcgctcgcagcgtgttgttagatattttcactcctgatgcgtgtctcgcgctgcttgagcagcagcgttgcacctgtatgctcggcgcaacgccgtttgtctatgatcttttgaatgtactagagaaacaacccgcggaccttagtgcgctgcgtttctttctttgcggcggaaccacaatccccaaaaaagtggcgcgtgaatgccagcagcgcggcattaaattattaagtgtttatggttccacagaaagtagcccgcatgcggtggtgaatctcgatgatcctttgagccgctttatgcacaccgatggttacgctgccgcaggtgtagagattaaagtggtcgatgacgcacgcaagaccttaccgccaggttgcgaaggtgaagaagccagccgtggcccaatgtgtttatggggtattttgatgaacctgaattaaccgcccgtgccctggatgaagaaggctggtattacagcggcgatctctgccgtatggatgaggctggctatataaaaattaccggacgcaaaaaagatattattgtccgcggcggcgaaaatattagcagccgtgaagtggaagatattttattgcagcatcctaaaattcacgatgcctgtgtggttgcaatgtccgatgaacgtttaggtgaacgaagttgcgcttatgtcgtgctgaaagcgccgcatcatagtttaagcctggaagaggtagtggctttttttagccgtaaacgggtcgcaaaatataaatatcctgaacatatcgtggtaatcgaaaaactaccgcgaactaccagtggtaaaatacaaaagtttttgttaagaaaagatattatgcggcgtttaacgcaggatgtctgtgaagagattgaataagtttcatcttcggggatcacataaccccggcgactaaacgccgccggggatttattttatttcttcagttcagccaggcttaaccaggtttgcaccacggtgtccgggttcagagacaggctatcgatcccctcttccatcaaccatgcggcaaagtcttcgtggtcggacggaccctgaccgcaaatcccgacatatttgccctgtttcttcgcggcacggatagccatgctcagcagtgctttcaccgcatcgttgcgctcatcgaacaattcagacaccacgccggagtcacggtccagaccgagcgccagctgcgtcatatcgttactgccaatactgaagccgtcgaaatattcgaggaactgctcggccagcaaggcgttggacgggatttcacacatcatgatgattttcagcccgttctcgccacgtttcagcccctgacgcgccagttcttcaaccaccgctttcgcctgatctacggtacgcacgaacgggatcatgatctcaacgttggtcagtcccatgtcgttgcgcacacgtttcactgcttcacactccagcgcgaaacagtcgcggaagctgtcggaaacatagcggcccgcgccacggaagccgagcatcgggttctcttcatctggctcgtaacgctcaccaccgaccaggttggcatattcgttgcttttaaaatcagagagacggacaatgacgcgcttcggataaaacgcggcacccagcgtcgcgatcccttcagtcagacgaccaacgtaaaattcacgcggagaatcaaaacctttcatcatctcgcggatttcgttttgcaactgcggttcctgatcgtcaaactcaagcagtgcgcgtgggtggacgccaatcatacggttgatgataaattccagacgcgcaaggcccacgccttcgttcggtaggcaggcgaagtcgaaagcacggtccgggttaccgacgttcatcatcactttcaacggcagatccggcatcgtttctacgctggagcttttcacgctaaattccagcaactccgcatagacgtaaccggtatcaccttcggcacaagaaacagtgacgttctcaccgtctttcatccgttctgttgcatctccacagcccactaccgccggaatgcccagttcacgagcgatgatcgccgcgtgacaggtacgaccgccacggttggtgacgatggcagatgctttcttcatgatcggttcccagtccgggtcggtcatgtcagtaaccagcacgtcgccaggttcgatgcggttcatttcgctgatgtcatggatgactttcaccggacccgcaccgatgcgatgaccgatagcacggccttcggcgataatcttaccctgactatgcagcgtataacgctccatgacctgaccgcgactgcgcacggtttccggacgcgcctgcacaatgaacagtttaccggtgtggccatctttcgcccactcaatatccatcgggcgaccgtagtgtttctcaatttgtacggcctgttttgccagttcctgcacttcttcgttggtcaggctgaagatgtcacgctgttcctgcggtacgtcttcgattttaacctgcttgccgtgctcctgggtcggcgcgtaaaccatgcggatttttttgctccccatggtgcggcgcacgatagccgggcgattcgccgccagtgtcggtttatgcacgtaaaactcatccgggttaaccgcaccctgcacgaccatctcaccaaggccccatgcggaagtgataaacaccacctggtcaaagccggattcggtatcaatggagaacatcacgccagaacttgcgaggtcagagcgcaccatccgttgaacaccggcggagagcgccacaccacggtgatcgtaaccctggtgcacacgataagagatggcgcgatcgttaaacagagaagcaaatacatgtttcactgccacgagaacggcgtcaaaaccctgaacgttgaggaaggtttcctgctgaccggcaaaagaagcgtccggcatatcttctgcggtggcggaggagcgcaccgcaaaagaggcgttttcgtcatcggcggaaagctgtgcataggcttcgcggatggcgttttccagctcaggctggaagggagtgtcgataatccactggcggatttgcgcgcccgctttcgcaagctgagtaacatcgtcaatatccgttttatccagcagttcataaatgcgctggtttacgccgctttggtccagaaactggttaaacgcgtcggcggttgtggcgaaaccattcggaacggaaacacccattccggaaagattagtaatcatttcacccagggaggcatttttgcccccaaccctgtctacatcattcatgccgagttggttataccaaagcaccagcggactgctgccattgttggacatcgaacaatccttttgtgataaatgaacggtttgagaaacacatttctgcgcatttatctttgcatatttaaccggatgaaaaaaacggtgaatcgttcaagcaaatatatttttttactttttaagactgatcccagcgttgcgcaaatctgctctcttcgacaatttccacataaaccatcggtataaacgaaaccataaaaatgaaatgctgttttcataaaaaataaaattgaaggttcattttataaaccagacataacgttctacgcttctgtgcgtttttaatttatgctttcatagaattatgtctgcatcacgggaagaacaaaatggataatgctgttgatcgccacgttttttatatttctgatggtacggcaataactgcggaggtattaggacacgcagtaatgagtcaatttcccgtcactatcagcagcatcacgctgccgtttgtcgaaaatgagagccgtgcacgggcagtgaaggatcagattgacgcaatttatcaccagacaggcgtgcgcccgctggtcttctactccatcgtgttgccggagattcgcgccatcatcttgcaaagtgaaggcttttgccaggatatcgttcaggcgctggttgccccgctacaacaagagatgaaactggatccaacgccgattgctcatcgtacccatggccttaaccctaataatctcaataaatatgatgcgcgcattgcggcgattgattacaccctcgcccacgatgacggcattagcttgcgcaatctggaccaggctcaggtgatcctgctcggtgtttctcgctgtggtaaaacccccaccagtctgtatctggcaatgcagtttggtatccgcgcggcaaactacccctttattgccgacgatatggataatctggtgctacccgcgagcctcaaaccgcttcagcataaattgttcggcctgactatcgacccggaacgtctggcggcgattcgcgaggaacgtcgggagaacagtcgctatgccagccttcgtcagtgcaggatggaagtcgcggaagtggaagccttgtaccgtaaaaatcagatcccgtggattaacagtaccaattatagcgtagaagagattgccaccaagatcctcgatatcatgggccttagtcgccgaatgtactaaagaactagtgcattagcttatttttttgttatcatgctaaccacccggcgaggtgtgacacacctcgcacttgaaatcagcagcgattggtttatcgtgatgcgcatcacttcccggcagtcctgccgtagaagcaacaaatttctgagacttgtaatgaacagaactgacgaactccgtactgcgcgtattgagagcctggtaacgcccgccgaactcgcgctacggtatcccgtaacgcctggcgtcgccacccatgtcaccgactcccgccgcagaattgaaaaaatactgaatggtgaagataagcgactgttggtcattattggcccctgcagcatccacgatctcaccgctgcaatggagtacgccacccgtctgcagagcctgcgcaaccagtaccagagtcggctggaaatcgtaatgcgcacctattttgaaaaaccacgaactgttgtcggctggaaaggactaatctccgatccagatttaaacggcagctatcgggtaaatcacggtctggagctggcgcgcaaattacttttacaggtaaatgagctgggcgtcccaaccgcgaccgagttcctcgatatggtgaccggtcagtttattgctgatttaatcagttggggcgcgattggcgcacgtactaccgaaagtcagatccaccgcgaaatggctagcgcactctcctgtccggtaggtttttaaaatggtaccgatggcaatacgcggattgctgtggatgctatccgcgcagcccgcgccagccatatgttcctcagcccagacaaaaatggtcagatgaccatctatcagaccagcggcaacccgtatggccacattattatgcgtggcggcaaaaaaccgaattatcatgccgatgatatcgccgcagcctgcgatacgctgcacgagtttgatttacctgaacatctggtggtggatttcagccacggtaactgccagaagcagcaccgtcgccagttagaagtttgtgaggatatttgtcagcaaatccgcaatggctctacggcgattgctggaattatggcggaaagtttcctgcgcgaaggaacgcaaaaaatcgtcggcagtcagccgctcacttacggtcaatccattaccgacccgtgtctgggctgggaggataccgaacgcctggtcgaaaaactcgcctctgcggtagatacccgcttctgaatgcgtgcccattcctgacggaatgggcatttctgcgcaacttgttgtcttctcaacaaattactgcttgctctggtcagccataatattgataataagaatcattgttatatcaattattattaatttttatgcgttatacggatagcagaaaactcacgcctgaaacggatgccaatcacaagaccgcttccccgcagcctattcggcgaatttccagccagacactgttaggtccggatggcaaactgattatcgatcatgacgggcaagaatatctgctccgtaaaactcaggctggcaagctgctgttgaccaagtaacctttaactgctgcagctgacttccagccgtttaccccagtcaggtggacgactgacatagtcatcatctctgtcgctgaaaggatttcgcaacgcctcatgcaggcggtgcaattccgtcatatcacccttttctgccgcttcaatcgcccgttgcgccaaccagttgcgcaataccagagcggggttaacgctttgcatcagttgctgacgctcactatcgctaacctcgtcttgttgcaaacgcccccgataacgggcaaaccagtcatcaaatgccgcacgatcaataaactcatcacgtagcggactcgccgcgctgtgctgctcggtcagactcagcatgcggaatgtgcgggtataatcgctgcgctctcgcgccatcagactgaataattcattcagtagcgcgttatcctctttttgctccgtcatgaagcccagtttctgccgcatccgttctccataatgcgtcaacaaaacctgctgatagctgtccagggcctcattcagggcatctacggcaacaaatgggctcaatgtctgcgccagacgctgtaaattccacaacgcgacggcaggttgattatcaaagctgtaacgcccttgatgatcgctgtgattacaaataaaaccgggttcgtaatcatcaagaaaaccaaacggcccgtaatcaagcgtcagccccagcaggctcatgttgtcggtattcatcaccccatgagcaaagccgaccgtctgccattgggcaattaagctcgcggtacgtgcgacaacatcgctaaaccagagacggtatttgtcctcatcatctgcaagatgactccagtaatgacgaatagcaaagtcagctaactgacgaaccttttcgctctcgcggcggtagtaaaaatgttcgaaatgaccaaagcgcagatgacttggtgccacacgcatcagcatcgcgcctggctccgccgtttcccgatacactgggctatcgctggtgacgatacttaacgcgcgggtcgtcggaatgcccagataatgcatcgcctcactggcgagactttctcgtatcgtgctacgtaaaaccgcccgtccatcacccattcggctataaggcgtcaggccagcacctttcagatgccagtccattgtagtgccatcagcaagcagttgttcgccgagtaaaatgccgcgcccatcacccagttggcccgcccagacgccgaactgatgaccactgtaaacctgcgccagtggactcataccaggcagtagggcttcgccgccccagacacctgcgccatttttaaacaggctgcttggaatactcagcgtgttagccagttcggtattatgccaaatcagccgggcattatttaaaggcgtaggggaaagtgctgtataggtttctggcaattcatcgcgccagcgggtaacaaaagacagggtcatagatcctcctgtttgatagtgtagacggttactctcgtcttaaacaccagcaaacagaagggttatcgctgaaccaacgtcgttatctgatttatgggaacggcaggccacaggcatccctggagagcatggaaatcgaagggggtaatctgtgccaatatttctgccgtatcaatgcctcccgcaatgatgcaattgcaacaaggggaaatttgcgcctggatcgcacgaataaacggttcgaaggagcggtgcgtgatttgttgctgaataaaacttttatccagcatgacgcgggtgaaaagaccatcaaaaaccgctttcattgtgctattgcctgctcccaaattacctaacacaaggggatacacttggcttaaggataaaagaccgcgattatcttttccttcattgagatgcgggtaattctcattaatcaacagttcaataaacggatattttaatagttcgcctgcgtaattatccctctctaataataatgtagccacttgtggcgttaaattaagccaggcaaagagtttatgttgaataaaaaaatgttggcaactttttagtaattccaactgctcactaaataattgccaatgttgctcctcggtaagttgcgctataacccgactcgtcgggatacgaaccgtaccatcttcactggagaaatgggtaattaactcaacgccgacaaggacttgctggttgtctcttatcggcaggaaatagcaatcagaatgataaagattctccaaaaaaatcttcatggtaaccgtccctctcgaaggatgtttttcagtatccggctaaaagggatgaggccataagacataacaattacagaaggagtaactttcatttgttccatgttaaccactttttcaggggtcctttttttagattatcctgattataaacgaataatccatttacggaatttttgtctgcaaaatactactgtattcaggagtaaatggacggcgatgtatcatcgccgtccatttttcgacatattagattcgtctcgcctgccagaaatttttctgccaatagacattatcaagactggaacgcatcactcccttgctggtagaggcgtggataaattggttgttggtatcgtaaatacctacatgcaaaccattttgtccggaccccgttttgaaaaagaccaggtcacctggcagcaactcgtctttatcaatttgcgtgccaatagaggcttgttgtttggtttcacggggcagctgcaaatcgaaacgatcgcgcatcgtcacaaccacaaatccgctacagtccacaccgcgccgcgtcatgccaccataacgatacggcgtgccatgccagctttgtagctggtcgttcaaaccggcaataacggtaatgctatcagaaagtctggcatttggcggcggtgctttatggtggctacacccggccagaagcagtgctgtgatcaaaataaggcagaaacgcattccgtacggttcctctgttttttattcttgcattaatttagcgtcgtaattacccgattttcaagatactaatgaaatcagatggtgctaatcagcattctgtgaccttcgatatccagacggcgaaaattcatcccataggcctgcgccagatttggcggcgtgagcacctcttccctgcgtccactggccagcatttttccaccttttagcaaccacgcccgatgcgcatgacgcaatgtgtggttgagatcgtgactgctcatcacaatcgccagtccttgctgacacagcgcgctcagaattttgtctaacgcactttgttgcgcaacatcaagactgttcatcggctcatcaagaagcagcaattggcctgcgggattggcttgtggtgtgatttgcaacaccaccgcagcaagacgtacgcgttgccattcaccgccggaaagttgattggtgctacgtccgagtttgtcatcaagagccagcgcccctgcgacatcattcagtagttcggtacgcgttttatcgtgctgatgcagtgtcaggtagtgccagaccggcgttgcaaacggcggcgtctgctgttgactaagataggcgcgatgcagcgcgagttttgttgcggaccatgcttccagtggttgccccgcgaactgaatgcttcccttaccgctggtcattccggccattcgcgccagtaaggtactcttacccgcgccattcggccccaccaggtgcaggatctccccagcccgaacctcgccagaaagcggccccaggcgggtagattccgcaacatcttgtaactgcatcacaatagacattattttgccaacgccagtttaatgctttccatcacaatgggatcttccggcgtcatatccggggaaaaacgctggatgacttttccgtccctgccaaccaggaatttttcaaaattccataaaatatcatccgggtacagcggtgcacggcctttgctgaccatacgggcatagaatccgctctcttccggcgcgactgcggtcggcgctgcggcaatcaatttttgatacagcggatggcgtccttcgccattaacttcaatcttactgaacatcgggaacgtcaccccccatgtggtggtacagtaagttttaatctcttcatcgctgcccggttcttgttccagaaactggttgcacgggaatcccagcaccataaaacctcgatcgacccaggctttctgaatattctccaactgctcatattgcggcgttaagccacacttactggcgacattgacaatcaacagcacattaccggcgaacttctccagcgtggtcacttcaccgtcgatatctttcactacggtcgtcagaatggaatcttgcatcgtttctcctgggtgtggtcagtaaaaatcttagcttttaatcatagaccgtctttttgcggttaacgtcctgcttttaacaataaccagataaacaccggcgcacctaacgttgcggtgaccacgccaataggcagctctgcggcagctaatgccaggcgcgctacaatatcggccagcagcaatgcgctcgcccctgccagcgcgcagccgggaagtaatacgcgatgatcggttaaaccacacaaccggagaatatgggggatcaccagaccaataaagccgatagcacccgccagcgccacactgacgccaaccatccagccggtcgctgccaccagcacattgcgccagaaccacaggggtaaacccagttgccgcgcgctgatctcgccaagtgctaacatattcatcggcctggactgacaacagatccacaacaacacggggatcaatgccagcatcagccagctttgccgccagtctacgccgccaaaaccgcccatcatccagtacatcagctgacgcaaatcaacactggtggaaaagtagatagcccacgtcattagtgcgctacagataatccctaatgcaacgccagccagcaataaccgactggtgctaagatgacgacgggcgaaacgtaagagtattaaagtgatgataagcgcgccagcaatcgcacacagccctagcgcccagttggggagttgcccttgcccaagcaataccgcggcgataagccccacgcctgcgccgttagagacgccaagtagtccaggttctgccagaggattttcaaacaacgcctgcattacagcgccggatatagccagcgccgcaccaaccagcaatacagccagcgtacgtggcaggcgaatttgccagacgaacagttcgccacgaggagtaaaccagtcacctgggctgatccattgttcaccggcgcaaaggcttaagagaagcgccagcagcatcaaaacactcaggcataataaccagcgaatattttgtcgctgttgttggcgggcaagtgtcagcatggtatccgttctgctgaagtgtcatggcgttgattttacggtgactcttcgacagtgaaaagaaaaaaggccgcagagcggcctttttagttagatcagattactcgtctttggggctagcgttttcgacccggctttttaacttctgcccgggtctgaaggtcaccacgcgccgtgctgtaatgggaatatcctcgcccgttttcgggttacgtcccgggcgttgattcttatcacgcagatcgaagttaccaaaaccagagagtttcacctgttcgccgttttccagagcgcgacggatctcttcgaaaaacagttcaaccagttctttggcatcccgcttgctaagcccaagcttatcaaacagatattcactcatttcagcttttgtaagcgccataggttcaatccctcaaacttgcctggaatcgctcttttaatgcctctacacatttggcgacggtagcggcaatctcctcttcttcgagtgtacggctggtatcttgcaggatcaggcttatggcgaggctcttatacccctccgcaacacccttaccgcggtacacgtcaaataagtttacgccaactacctgatttacgccaactttcttacattcggataaaatatccgctgcgggaacgttttctgcgaccaccaccgcgatgtcacgacggttcgccgggaagcgagaaatctcgcgcgcctgaggcaccacgcggtctgcgagcttgttccactccagttcgaacaccagagtgcgaccgttaagatccagtttacgttccagttcaggatgaacaaccccaacaaaaccaatacgttcacctttcagataaatcgctgcggattgccccggatgcagtgccggattcgcttctgcacggaactcaacctcattcagtttaccggtcaggtcgagaacggattcaagatcgcctttcaaatcatagaaatcaacggtctcttttgccaggttccagtgctcttcgtaacggttaccgcaaatcacaccggctaacatcagatcctgacgaatgcccaacggtgcctgagtatctggtacgaaacgcagaccgctttcgaaaatgcgcacacggttctgctgacggttctggttgtacaccacggttgccagcaggccagtccacagagaaagacgcattgcactcatttcaacagagatcgggcttggcagcagtaaggcttcaacgcctggatggatcatctgctgcactttcggatcaacgaagctgtaggtgatcacttcctgatagcctttgtcgttgagcagcgttttcacgcgcttgaggctcaggtcagcttcacggtgagtacccataatcaggcttgcctgtaccggctcatccgggatgttgttgtagccgtaaacacgcgcgacttcttcaaccagatcttcttcaatctccatatcgaaacgccagctcggcgcaactgcctgccattcgtctttgccttcggtcacttcgcagccgagacgacgcagaatgtcagttacctgctcatccgcaatatgatggccgatcaggcgatccagtttgctacgacgtagagtgatggttgcacgcttcggcagcgttgcttcgttggtgatatcaattaccgggccagcctcaccaccgcagatgtcgatcagcagacgggtcgcacgttccatcgctttgtgctgcagtgccggatcaacgccacgctcataacggtgagacgcatcggtatgcaggccatgacgacgagcacgaccggtgatagacagcgggctaaagaacgcgcattccagcagcacgttttgtgtttcgtcattcacgccagagtgttcgccaccgaagatgccgcccatcgccagcgccttgttgtggtcggcgatgaccagagtgtcagcattcagcttcgcttcagtaccgtcgagcagcaccagcgtttcgccctctttcgccatccgcaccacaatgccgccttcaatgcgatctttatcgaaagcgtgcatcggctggcccagttcgagcagcacatagttggtgacgtcaacaactgcatcgatagaacggatcccgcaacgacgcagtttttctttcatccacagcggagttggcgctttaacgttaatgccttttaccacacggccaagataacgcgggcaggcttccggcgcttcgactgtaatcggcagcgtgtcgtcgatggtcgcaccaaccggaacgatttccggttgaaccagcggcagctggttcagcacggcaacgtcacgcgcaacaccaatgatgcctaagcagtcggcacggtttggcgtcacgctgatttcgatggtgttgtcatcaagtttcaggtattcacggatatcggtgccaatcggcgcatccgcaggcagttcgataatgccgctgtgatcgtcagaaatgcccagttcagagaaggagcacagcatcccttcagacggttcgccacgcagtttcgccgctttaattttgaaatcacccggcagaacagcaccaatggtcgctaccgctacacgcaggccctgacggcagtttggcgcaccgcagacgatgtccagcaggcgatcgccgccgacattcacttttgtcacacgcagtttgtcagcgttcggatgctgcgcacactcaaccacttcaccaacgaccacgccgtggaagctgccggcaaccggttctacaccgtcaacttccaggcccgccatagtgatttgatttgccagcgcatcgctatcaatcgccgggttcacccattcgcgtaaccacagttcactgaatttcataatctattcctgccttatttaaactgtttgaggaaacgcagatcgttttcgaagaaactacgcaggtcggtgacgccgtaacgcaacatagtcagacgctccatccccatcccgaaggcgaaaccagagtaaacttccgggtcgatgccaacgttacgcaacacgttcggatgcaccatcccgcagcccagcacttccagccatttaccgtttttacccatgacgtccacttctgcagaaggttcggtaaacgggaagtaggaaggacggaagcgaatctgcaaatcttcctcaaagaagttacgcaggaagtcgtgcagcgtgcctttcaggttggtaaagctgatgttggtatcaacaatcagaccttccatctgatggaacatcggcgtgtgagtctggtcgtagtcgttacgataaacacggccaggcgcgatgatacgaatcggtggctgctgggctttcatggtgcggatctgtacgccagaggtctgggtacgcagcaggcgggtagtgtcaaaccagaaagtgtcgtggtcagcgcgcgccgggtggtgaccaggaatgttcagagcatcgaagttatgataatcgtcttcgatttccggcccggttgccacggtaaagccaagctcaccgaagaaactttcgatacggtcgatggtacgggtaaccggatgcagaccgccgttttcaatgcgacgacctggcagagagacatcaatcgtttccgccgccagacgcgcattcagtgcagcgctttccagttccgctttacgcgcattcagcgcctgctgaacctgctctttcgcttcgttgataaccgcaccagctgccggacgctcttctggcggcagctcacgcagggtcgtcatctgaagggttaagtgcccttttttacccaaatattcgacgcgcacattatctaacgcggcaacatcactcgcctggctaatggccgccttcgcactggcaaccagttctgcgagatgactcatggttttcctcattgtgtcagtggtgacactggttcgttggacttagagcctatcccatcaggctattttacttgccattttggtcccgggctgtgctcgaaattctcacgtacttaaatacgctccggtttctccgcgctggccgtgtccagtctggctgcgacaattacacctgatgagacaggctttttatttttcaaaacgcgcatacaaaaaaagcctccactgggaggctttcaggcgctgttttccgtttctcttctcacgcgctagcctcctggattcaggtgctaaagtaaaaaaagaagcggaaaatagcagcattcattgcttgcgttaccttttggtactcttcaaaagacctttattgaaaaggctacggcgataaaagtcaatgttttgatggcgttgaaacgaaaagagggagactagctccctctttcaactggcttatgccagagctgctttcgctttttcaaccagagcggtgaacgctactttgtcgaatactgcgatatcagccaggatcttacggtcgatttcaacagaggcttttttcaggccattgatgaatttgctgtaagaaataccgttctgacgtgctgctgcgttgatacgcgcaatccacagttgacggaactgacgcttacgttgacgacggtcacggtaagcatactgaccagctttgataacagcctggaaggcaacgcggtatacgcgagaacgcgcaccgtagtagcctttagcttgtttcaaaattttcttgtgacgtgcacgtgcaataacaccacgttttacgcgagccatatgtgctctcctgtatctatattctaattaaaaagttaaaaacgttaacggcttatgcgtacggcaggcacgcgattaccaggcccagatcgcctttggaaaccatggctttcggacgcaggtgacgtttacgtttggtcgcttttttggtcagaatgtgacgcaggttagcgtgcttgtgcttaaaaccacctttaccggtttttttgaagcgcttagcagcaccgcgtacggtcttaatttttggcattttaataacttccacttcgcattgttaataaacgaaacaaaggcgaacaaagcctgtgaagcccgaaggctccacagacagtgctacttgaaggccttactgtttcttcttaggagcgagcaccatgatcatctggcggccttcgatcttcgttgggaaggattcgaccactgccagttcttgcaaatcgtctttcacgcgattaagcacttccataccgatttgctggtgcgccatctcacgaccgcggaaacgcagcgtgattttggctttatcaccctcttcgagaaagcgaatcaggctgcggagttttacctgatagtcgccttcatctgtaccaggacggaatttaatttccttaacctggataactttttgctttttcttctgttccttagaagacttgctcttttcatagaggaatttgccgtaatccattatacgacaaaccggcggctcggcgttagggctgatctcgactaagtctactccggcttcttctgctttctccagagcttctctcagactcacaataccaagctgctcgccttccagacctgttaagcgaacttcctgggcgcgaatttcgccattgatacggttagggcgcgccgtttgaactcgttttccgcctttaataccttattcctccaattgtttaagactgcggctgcgaatctcttgttgcagcttctcgatcacttcatttacgtccatgcttcccaggtctttaccacggcgggtgcgaacggtaactttgccactttccacctctttatcaccacagaccagcatatatgggacgcgacgcaaagtgtgctcgcggattttaaagccaatcttctcatttctcaagtctgctttaacacgaatgcccgcattacttagtttttgcgtcaattcgttaacgtattcagactgactatcggtaatattcatgataacaacctgaaccggcgcaagccaggtcgggaagaaaccagcgaactcttcggtcaggataccgatgaaacgttccatgctccccagaattgcgcggtgaatcattaccggtactttacgttcattgtcttcgcctacataagaagcgctcagacgagacggcaaagagaagtccagctgtactgtaccgcactgccatgcacgatcgaggcagtcatacagggtaaattcaattttcggaccgtagaaagcgccttcacccagttgatattcaaacgggatgttgttttcttccagcgcaaccgccaggtccgcctcagcacgatcccacatttcgtcgctgccaatacgtttttcaggacgagtggagagtttgacgacgatcttctcgaagccaaaagtgctgtacatatcatagactaaacggatacatccgttaacttcatcgcgaatttgttcttcagtacagaagatatgcgcgtcatcctgggtaaatccacgcacgcgcatcaggccatgcaggctaccactcggctcgttacggtggcagctaccaaactcggccatacgcagcggcagatcgcgataagacttcagcccctggttgaaaatttgtacgtgacccgggcagttcatcggcttaatgcagtattcacggttctcagaagatgtggtgaacattgcatctttgtagttgtcccagtgaccggttttttcccacaggacacggtccatcatgaacggacctttaacttcctgatactggtactctttcagtttagaacgaacaaacacttccagttcacggaagatggtccagccgtcgttgtgccagaataccatacccggcgcttcttcctgcatatggtacaggtcgagctgtttaccgattttacggtggtcgcgtttcgcggcttcttccaggcgctgcaggtaagcgttaagtgcttttttgtctgcccacgccgtaccgtaaatacgttgcaacattttgttgttgctgtcgccacgccagtaagcccctgccgttttcattagtttgaaatgatggcagaaacgcatgttcggtacgtgcggaccgcggcacatatcgacatattcttcatggaagtacagacctggcttgtcatcatgggcgatgttttcgtcaagaatggagactttgtagctctccccacggttggcgaaagtttcacgcgcttcgtgccagctgactttcttcttaatgacgtcgtagtttttctcagcaagctcatgcatccgcttctcgagtgcttcgacatcttcctgggttaacgtgcggtcaagatcaacgtcgtaataaaaaccgttgtcaataaccgggccgattgccattttggtatgcggccaaagttgtttaatcgcgtgccctaacaggtgcgcacaggagtgacgaatgatctccagaccttcttcgtctttggcggtaatgatgctcagttgtgcgtcgttttcaatcagatcgcaagcatcaaccagttcgccattaacgcgccctgcgatacaggctttcgccagacctggaccaatgtccagcgcaacatccatggggcttacagcgtgatcgtaatggcgttggctgccatcaggaagagttataacaggcattttatatccttatttgcagtggtgacccacacgaaagatcacatacaaagaaaaatttgtttattaacagttcattgcgaaaccatctagccaacaaatgctaaattggttcgcaatcaggtacacaaatgaaagacattaacctctcaccttccacccggttgagcgatgttaacactaaaaaaagggagattgtacctttccgtttcacattgattcgattcgcaattcgtttgtagtgagtacaccagcaaaacgcttaaagaacaactgataacatcacggtgcgtctgaaaggtttactgcgagcggatttacagcagcataaactgaatccagcaaagttcgttgcgtgatttggcggtagtattttaaacgctcatgagattaatgacgaagtggtcatatcacaatgataaaagtgacacaattcttataacaatttttcgtgcacatttcgttctggcgataataattaatcatcatcctcaaaacctccagatatatataaggcgaacagattatgagtcaaaacgatatcattatcagaactcattataagtctcctcatagattgcacatcgatagcgacataccaacaccttcatcagagcctattaatcaatttgcgcgccagctcatcaccctacttgatacctctgacttaagttcgatgctgtcatactgtgttactcaggaatttaccgcaaactgtcgaaaaatatcacaaaattgttattccactgccctttttaccattaactttgccacttcacccatccatacagaaaatatactcattacattacactataaaaaagaaatcatttccttattactggaaaccacgcctattaaagctaaccatttgcgaagcatactggattatattgaacaggaacagttaactgctgaagatcgtaaccattgtatgaaactgtctaaaaaaatccatagagaaaaaaactatacacccaacagtaaatctcaatggtagtgcatgttttttgcaatctccttctgacgctattttttgtcgccatctgtcattgcaatacgcccttgattcattgagaaatggaaaaggcaaagtcaacctgattaaacattactcctccgttgaatccatacagcagcatgtccccttagtccgggacgcggagttcagagcattacttcgccatcctcctgcagggagtcgcgttatcgcgagtaaggattttggcttcgctttagatattttcttttgtcgaatgatggcaaacaatgtcagtcatatgtccgcgattttatatatagacaatcatactttgtcagtaaggctacgaataaagcagtcagtgtatggacaattaaattatgttgtgtccgtttacgacccgaacgataccaacgttgccgtcagagacacccacaggacagcacggggctttctttcgcttgataagttcatcagttcaggtcccgatgctcagacctgggctgatagatatgttcgcaactgtgcaattgctattctgcccctattacctgtgggagttccaggggctattttcgcgggtattgcatcacgaatgccatttgcccctatacatccatcggcaatgttgttaataatggctacaggccagtctcaacagcttattacattattcaaacagttgcccatactccctgaaaaagaaatcattgaaataataactgcgcagaatagcgttggtacacctgctttatttttggctatgatgaacggacatactgacaacgtgaaaatatttatgcaagaaattcagtcactggtagataatcacatcattcatgaagataatctggttaaattactgcaaactaaaagtgctaacgaaacacctggactttatatctccatgttgtatggattcgatgaaataatcgatatctttctgaatgcattaaccactccaatagcacaagagcttttaaacaaaaaactggtgatgagtattttagccatgaaaatacatgatggtgagccaggattatacgccgcaatggaaaataatcaccctttgtgtgtcacacggttcctctctaaaattaatggcatcgcctttaaatacaagttgagcaaagctaacatcatggatttattaaaaggagctacagcacagggaacccctgcattatacatcgccatgagcaagggtaatgaagacgtcgtgttatcttatatatcgacgctgggtgcttttgcaaaaaaacattcttttagtcaacatcagttatttacactattggccgctaaaaatcatgacaacatgtcagctgttcatatagccattcatcataagcattataaaactgtagaaacatattatgctgctattaatgcaatcagccaaagcctgagttttagtgctgatgaaataaagacgtatttataaccagctatttacgatatatatcgatacataattttatttttttcataaaacgcagaaacagtgaccatgtgcacaacgccacccgacggctgtaataacaaaaaatcccttgatgcctgtcccttttgttacactccgttatcacgcacaagagatatgcaggacactggtatgccgactaaacgctttgataaaaaacactggaagatggtggtggtgctactggcaatctgtggcgctatgttgttgctacgttgggcagcaatgatttggggctgagcagtgacaaacgaagacagccagaccgcataacacggtccggcagataattttacatgctgtagcccaggcttaaggttgtccgacggtcggtatgttccggtgcagactctggaggttcagagttccatgtgacgttgtaagccaccttcagtccaaaatgttcattaatagcaacatttaatgcgctttcggagttcagcgttgtgtcttccgcgccaaagacgctaacaccctgcgtaaatttagcgttgtcagtcaactgccatgcataagccccggaggcatagcccagcggctgggtttcactggcattgtcggtatatttgtcgtaacgcacacctggaccgaattcaaagcggaaactgtgtaccgggccattcaaaaactgacgaccataacccgcggtcaacacatcgcgctctcgatagccgttataacggtctgtcagccagcttgcctgaccaaataaatagtcataatcagttaaattaaaacggctacgcccgcccgccgcatatttttcactagaacgctcatcattagaagaagtattactggcgttcccccacaggctccaggcagtggtgtgtccataccaggtcatggtggtgtcagccgtaagactggagcttttcgtattgccactttgtgcaagatatcctgcgttcagattaccttcgaaaggttttttagcgctggcaggatcatccatgacagtaaaaacggaatcatcggcagctgcattcagactcgcaaacatgccccccgccaacataacgatggcaggaactgtcttcaaaagcttcatttatcaagagtccgtacaacaaaaaaagagaccatcgcggtcccggaaactttcttaaggatcaaagattagcgtccctggaaaggtaacgaattataaaaaggcgcgaataacttagcaatgtattcttatttcattttttgaataagcatgtggcgaaaacagatttttatttatatatatttatctgcaaaattttaaataaagctccaataaatcatattgttaatttcttcactttccgctgattcggtgccagactgaaatcagcctataggaggaaatgatggtacgtatctatacgttgacacttgcgccctctctcgatagcgcaacaattaccccgcaaatttatcccgaaggaaaactgcgctgtaccgcaccggtgttcgaacccgggggcggcggcatcaacgtcgcccgcgccattgcccatcttggaggcagtgccacagcgatcttcccggcgggtggcgcgaccggcgaacacctggttagtctgttggcggatgaaaatgtccccgtcgctactgtagaagccaaagactggacccggcagaatttacacgtacatgtggaagcaagcggtgagcagtatcgttttgttatgccaggcgcggcattaaatgaagatgagtttcgccagcttgaagagcaagttctggaaattgaatccggggccatcctggtcataagcggaagcctgccgccaggtgtgaagctggaaaaattaacccaactgatttccgctgcgcaaaaacaagggatccgctgcatcgtcgacagttctggcgaagcgttaagtgcagcactggcaattggtaacatcgagttggttaagcctaaccaaaaagaactcagtgcgctggtgaatcgcgaactcacccagccggacgatgtccgcaaagccgcgcaggaaatcgttaatagcggcaaggccaaacgggttgtcgtttccctgggtccacaaggagcgctgggtgttgatagtgaaaactgtattcaggtggtgccaccaccggtgaaaagccagagtaccgttggcgctggtgacagcatggtcggcgcgatgacactgaaactggcagaaaatgcctctcttgaagagatggttcgttttggcgtagctgcggggagtgcagccacactcaatcagggaacacgtctgtgctcccatgacgatacgcaaaaaatttacgcttacctttcccgctaacaaaaacattcccccagcattgggggaatcatcaccaacctgtcggcaacgcgtttctccgactatgctcaaaagtcatgtgataacaaaggggtgaactatggccagtggcgatcttgtccgttatgtcataaccgtcatgttgcatgaggatacattgactgaaattaacgagttgaataattacctgactcgcgacggttttttgctcactatgacggatgatgagggaaatatccatgagctgggaactaacacttttggacttatcagtacccaaagtgaagaagaaattagagaactggttagcgggcttacccaaagtgcaaccggcaaagatcctgaaatcaccatcacgacctgggaggaatggaatagcaacagaaaataaatggtttttgggcaataatcagtctgtggtgtgcgttagctcgtgtttttacaccgcattcttgcgctaaccttatgatctggcagacaacatgggagagacatcatgtggcaggcaatcagtcgtcttttgagcgagcagttaggtgaaggcgaaatcgaactgcgtaatgaactgcctggcggagaagtccatgccgcatggcatttgcgctatgcaggacatgattttttcgtcaaatgtgatgaaagggaactgcttcccggttttaccgccgaagccgaccaactggagttactgagccgtagtaaaaccgtcaccgtgcctaaggtttgggcagttggcgctgaccgtgactacagttttctggtgatggattatctcccacctcgtccgctggatgcgcatagcgcatttattcttggtcagcaaattgcgcgtttacatcaatggagcgaccaaccacaatttggccttgatttcgataacgcgctctccacaactccacagcccaacacctggcaacgtcgctggagtacgttttttgctgaacaacggattggctggcagttggaactggctgcagaaaaagggatcgctttcggcaatatcgacgccatcgtcgagcatattcagcagcgtctggccagtcatcaaccgcagccttctctgttgcacggcgatttatggtccggcaactgtgcactgggtccggatggcccgtacattttcgacccggcctgctactggggtgaccgagagtgcgacctggcgatgttaccgctgcatactgaacagccgccacaaatctatgacggctatcagagtgtatccccgctacctgccgatttccttgaacgtcaaccggtttaccaactctacacgctgttaaatcgtgcaaggttatttggcggtcagcatttggttattgctcagcagagtttggatagattattagcagcatgatatgggttgaggataatggccgctccgtgcggccttttgattaaataaacccaagcagagaaaagaacacataacctgcagcaatacaaataaccggcaggatatacagactgaaaaactgcaggaaaatagtatggtgcggaacaacaatacgggactcaatttgttcacgcgttagcccctcttcccctttggctttttccagaatgagttgatcttcaacaccttcccgcaagaagcgcgcctggcgactcatccgggcaccggaatcctgcaacgccagtccgacaaaaatcaggatgaaaatcacccagaacataacgttcacgccaccattaaaattgggcgtcggggagttataccagaatagattcaaaaaaggcgtattcgcctgcatcatatcgatcatgacatgagtaaagtcgagcatgaccgcattaatgccttccttgttttcctgccgggtattcataaatttcagcaaagaaatcaatgtagagatcaatgcaggtataaaaatcacccaacccaaaatccttttcaaaacagcaatgcgtccagcttgttgatacgtcatgagttctccttgattaagacgcgtcgtttcacttagtttacctgtagatatctgttttcgcccattctttaaaggcgatatgataggcgcttaatcataagcacggcttaataccttacacataatgctctaaaggagaggttgtaatgagtaccccgcgtcagattcttgctgcaatttttgatatggatggattacttatcgacagtgaacctttatgggatcgagccgaactggatgtgatggcaagcctgggggtggatatctcccgtcgtaacgagctgccggacaccttaggtttacgcatcgatatggtggtcgatctttggtacgcccggcaaccgtggaatgggccaagccgtcaggaagtagtagaacgggttattgcccgtgccattagtctggttgaagagacacgtccattattaccaggcgtgcgcgaagccgttgcgttatgcaaagaacaaggtttattggtgggactggcctccgcgagtccactacatatgctggaaaaagtgttgaccatgtttgacttacgcgacagtttcgatgccctcgccagcgccgaaaaactgccttacagcaagccgcatccgcaagtatatctcgactgcgcagcaaaactgggcgttgaccctctgacctgcgtagcgctggaagatagcgtaaatggcatgatcgcctctaaagcagcccgcatgcgttccatcgtcgttcctgcgccagaagcgcaaaatgatccacgttttgtattagcagacgtcaaacttagtagcctgacagaactcaccgcaaaagaccttctcggttaatgaccaggggcagtgatctcgctgcccctggttctttatctgaaattgcattcaactgacggattaatcgtcaatttaagagaaagagttacaccgtcaccacttccgtgcactgtataaaaatcctatactgtacgtatcgacagtttagtgagttttatcatgacggcggaaggtcaccttctcttttctattgcttgtgcggtatttgccaaaaatgccgagctgacgcccgtgctggcacagggtgactggtggcatattgtcccttccgcaatcctgacgtgtttgttaccggacatcgatcacccaaagagctttcttgggcagcgattaaaatggataagtaaaccgatcgcccgcgcttttgggcatcgtggttttacccacagtctgctggcggtatttgcgctgctggcaaccttttaccttaaggttccggaaggctggttcattccggctgatgcgctacaaggaatggtgctgggttatttgagccacatacttgccgatatgctgacacccgccggtgttcccctgctctggccatgccgctggcgtttccgcttgcctatcctggttccccaaaagggcaaccaactggaacgttttatctgcatggcattatttgtctggagcgtatggatgccccatagtttacccgagaacagcgctgttcgttggagtagccaaatgatcaataccttgcagatccagtttcatcggcttattaagcatcaggttgaatactaaaaaggcaaaaatcacctttctggaataagcaattccatttgaatataagagccagctcacagttctgttaatcttgcgccaacactatgactgctacgcagtgatagaaataataagatcaggagaacggggatgaactttccattaattgcgaacatcgtggtgttcgttgtactgctgtttgcgctggctcagacccgccataaacagtggagtctggcgaaaaaagtgctggtgggtctggtgatgggtgtggtttttggccttgccctgcataccatttatggttctgacagccaggtacttaaagattctgtacagtggtttaacatcgttggtaacggctatgttcaactgctgcaaatgatcgttatgccgttagtcttcgcctctattctgagcgcggttgcccgtctgcataacgcatctcagttaggcaaaatcagttttctgaccatcggtacgcttttgtttaccacgctgattgcggcgctggtcggtgtgctggtcaccaacctgtttggtttgacggctgaaggtctggttcagggtggtgcagaaactgcacgtctgaacgccattgaaagtaactatgttggtaaagtctctgatctgagcgttccgcagctggtcttgtcctttatcccgaaaaacccgtttgccgatcttaccggagccaatccgacgagtattatcagcgtggtaatttttgccgcattcctcggcgtagctgcattgaaactgctgaaggatgatgcgccgaaaggtgaacgcgtcttagccgctatcgataccctacaaagctgggtgatgaaactggttcgcctggtcatgcagttgaccccttacggcgttctggctctaatgaccaaagtggttgcaggttctaacttgcaagacatcatcaaactgggaagtttcgttgtcgcgtcctacctcggtctgctgattatgtttgcagtgcatggcattctgctgggcattaatggcgtgagtccgctgaagtacttccgtaaggtatggcctgtgctgacgtttgcctttaccagccgttccagtgctgcgtctatcccactgaatgtggaagcacaaacgcgtcgtctgggcgttcctgaatccatcgccagtttcgccgcctctttcggtgcaaccattggtcagaacggctgcgccggtttgtatccggcaatgctggcggtgatggttgcgcctacggttggcattaacccgctggacccgatgtggattgcgacgctggtcggtattgttaccgttagttccgcaggcgttgccggtgtcggtggtggtgcaactttcgccgcactgattgtactgcctgcgatgggcctgccagtaaccctggtggcgctgttaatctccgttgaaccgcttatcgacatgggccgtacggcgttaaacgttagtggcagcatgacagctggcacgctgaccagccagtggctgaagcaaaccgataaagccattctggatagcgaagacgacgccgaactggcacaccattaattcttatgctggcaacggtccgttttgtataggggccgttgccttactttttaaatgttccatcgcggcgatgcatacactctcatatttaaacagatcgtcagcgaaaaaaatgtccaacttatcaatacattcctggctcaaactatgtgcctgtaggctgaagcttaaaacctcatacccgagacgttttctaagactactatctggaatactcataatatcttcaagcacaccacttcccattcccggaagatttagtggattaaaaagaagattgatattaagcatacttattatgctaggaaactttaggagactctcatttttttgaatcgcagcaaaaatgctcccgacaggatgtatataattttgttcatagtatatagtccttaaatagtgaataaccaacctgttttttatactgatcaaattggtcattttttctgggcgaaatacagaagtgacatccattccaataaaatctttatttatacctcttatccgaatttcactaccataaagattattaattattactctatatttaacattgtcctgcagatatgtatcaaaactaagtgctggcgctcctggcttactggcatcatagttaatgttagacatataggcaatcatataattaaagttactttctgctatttcatcgcagtcacattgacccgtacttataaagaaagtgagtgctgtcatagtagactgcagcctttctttaaaagagtcgaaagccaggcttttaatatttaaatcaccataattactctgtattaagtttgtagaaaacatctcccgcctcatattgttaacaaaattattatctcatttaaatctaagtcatttacaatataagtttaagagcgacgccacaggatgaactatcaaaaatagctcatcatgattagcaaaacttaaccattttaaaataaataaacaattaaagaaaaaagatcacttatttatagcaatagatcgtcaaaggcagctttttgttacaggtggtttgaatgaatgtagcaacgaaatacagaatttcaggtcatgtaactcccggcaaaaccgggaggtatgtaatccttactcagtcacttccccttcctggcggatctgatttgcccaacgttgggcagattcaggcacagtaaacgccggactgcgcagaaaactctctcccatcagtacaaacgcaacatatttgccacgcagcatccagacatcacgaaagctatccatctttatcgcatgttctggcggcgcgggttccgtgcgtgggacatagctaataatctggcggttttgctggcggagcggtttcttcattactggcttcactaaacgcatattaaaaatcagaaaaactgtagtttagccgatttagcccctgtacgtcccgctttgcgtgtatttcataacaccgtttccagaatagtctccgaagcgggatctggctggtggtctatagttagagagttttttgaccaaaacagcggccctttcagtaataaattaaggagacgagttcaatgagccaacataacgaaaagaacccacatcagcaccagagtccactacacgattccagcgaagcgaaaccggggatggacagtctggcacctgaggacggctctcatcgtccagcggctgaaccaacaccgccaggtgcacaacctaccgccccagggagcctgaaagcccctgatacgcgtaacgaaaaacttaattctctggaagacgtacgcaaaggcagtgaaaattatgcgctgaccactaatcagggcgtgcgcatcgccgacgatcaaaacagtctgcgtgccggtagccgtggtccaacgctgctggaagattttattctgcgcgagaaaatcacccactttgaccatgagcgcattccggaacgtattgttcatgcacgcggaagtgccgctcacggttatttccagccatataaaagcttaagcgatattaccaaagcggatttcctcagtgatccgaacaaaatcaccccagtatttgtacgtttctctaccgttcagggtggtgctggctctgctgataccgtgcgtgatatccgtggctttgccaccaagttctataccgaagagggtatttttgacctcgttggcaataacacgccaatcttctttatccaggatgcgcataaattccccgattttgttcatgcggtaaaaccagaaccgcactgggcaattccacaagggcaaagtgcccacgatactttctgggattatgtttctctgcaacctgaaactctgcacaacgtgatgtgggcgatgagcgatcgcggcatcccccgcagttaccgcaccatggaaggcttcggtattcacaccttccgcctgattaatgccgaagggaaggcaacgtttgtacgtttccactggaaaccactggcaggtaaagccagtctcgtttgggatgaagcacaaaaactcaccggacgtgacccggacttccaccgccgcgagttgtgggaagccattgaagcaggcgattttccggaatacgaactgggcttccagttgattcctgaagaagatgaattcaagttcgacttcgatcttctcgatccaaccaaacttatcccggaagaactggtgcccgttcagcgtgtcggcaaaatggtgctcaatcgcaacccggataacttctttgctgaaaacgaacaggcggctttccatcctgggcatatcgtgccgggactggacttcaccaacgatccgctgttgcagggacgtttgttctcctataccgatacacaaatcagtcgtcttggtgggccgaatttccatgagattccgattaaccgtccgacctgcccttaccataatttccagcgtgacggcatgcatcgcatggggatcgacactaacccggcgaattacgaaccgaacagcattaacgataactggccgcgcgaaacaccgccggggccgaaacgcggcggttttgaaagttaccaggagcgcgtggaaggcaataaagttcgcgagcgcagcccaagctttggcgaatattattcccatccgcgtctgttctggctaagtcagacgccatttgagcagcgccatattgtcgatggtttcagttttgagttaagcaaagtcgttcgtccgtatattcgtgagcgcgttgttgaccagctggcgcatattgatctcactctggcccaggcggtggcgaaaaatctcggtatcgaactgactgacgaccagctgaatatcaccccacctccggacgtcaacggtctgaaaaaggatccatccttaagtttgtacgccattcctgacggtgatgtgaaaggtcgcgtggtagcgattttacttaatgatgaagtgagaagcgcagaccttctggccattctcaaggcgctgaaggccaaaggcgttcatgccaaactgctctactcccgaatgggtgaagtgactgcggatgacggtacggtgttgcctatagccgctacctttgccggtgcacctagcctgacggtcgatgcggtcattgtcccttgcggcaatatcgcggatatcgctgacaacggcgatgccaactactacctgatggaagcctacaaacaccttaaaccgattgcgctggcgggtgacgcgcgcaagtttaaagcaacaatcaagatcgctgaccagggtgaagaagggattgtggaagctgacagcgctgacggtagttttatggatgaactgctaacgctgatggcagcacaccgcgtgtggagtcgcattcctaagattgacaaaattcctgcctgatgggaggcggcgcaattgcgccgcctcaaatgatttacatagtgcgctttgtttatgccggatgcggcgtgaacgccttatccggcctacaaaactgtgcaaattcaatatattgcaggaaacacgtaggcctgataagcgaagcgcatcaggcagttttgcgtttgtcagcagtctcaagcggcgcagttacgccgcctttgtaggaattaatcgccggatgcaaggttcacgccgcatctggcaaacatcctcacttacacatcccgataactccccaaccgataaccacgctgagcgatagcacctttcaagctcgcacttgtcaacacatccagctccgttaagcgtgggaaacagtaagcactctgacggatagtattatcgataaacgccggatgacacatcacctccaggctacgatcaccccgatggcctgcgtcatccagcacttgcaggaacaggctctcactgatctcttcaccgtagaatgcactgctgaatccctgggtagtgcgcaggttgaccggcaaatcaaacgccatctgacgatccgcccgcaacgcaatgccctgctctgccgcaaacctggcaacaatcgggaaaatctgcgggaacatatgcacatgatgatggctatcaagatgcgtaggtttgcgtccaaatagctcaatgaaacgcaaatactgactgacaagctcctgagtaatttcttccagcggtaaagcatcttcttctgccaactgccagatccattttcccagcacaccatcgcgggttaaccccggcatagctgtcagtggcttacccatagtaaggacaaagtgcatccctatggccagactcggttcatcacgactcaactgcaccgcatggtcaatagcctgcccattcaccagcgccgtcgtgctcgtgacaatcccattgcgacaggcctcgataatgccgtagttctgacctttgcttaagccaaaatcatcggcattaacaatcagtaagcgttccataatcagcctcggttaatgtgcttttttaagctctgcgatgcagtcggcaaagtttggcagccatttctcgtgcgccagaatcatctcgcgtgctagcagctcagcatcgcgatcggaatgcaccaacggactaaggtttagcgccagtaacacatcgttaaattctccgctaagtgcggcgttactggcagcaatctcgaagcctttaatggtgtgaatcagccccattactttatcatcgaaatgcgtaatgcgcggatgtggcgtcgcgccatcgcgccccagcttacaggtcatttctactgcccagtctgccggaatattatcaatctgcccatgatgcgggatattaacgtaatgttctgcttgcttgtcgttgtagatagcgttgatcacttcgcatgctgcatcagagtaataagccccaccgcgctgttccagttctttcggcttaactttcagctcaggatttttatacagctcaaaaagttgtttctcgactttctgtactacctgcgctcgtgcgccgcctttgtagtattcgcccatttcaatagccagcatctctttctgcttgaagtaatacagcagataagaacatggcagcagattcaagctacgaattaagccctcactaaatggcagatcgaaaatattttttacagaggacgcttttaactgcccactcgccacaccatcaagcaattcggcaaagcggctcttgccatttatcagcacatccttaatgaacaccatatggttgaggccgaacaaatcgatagataaatcatcgctgtctttcagcatcagaacatcgcgaataaacatcttcatgccgatcggaatattacacacgccgataaagcgtttaaatccggtatgacgataaacggcttcagtgaccattcccgccgggttagtgaagttaatcacccatgcattcggacaaagttcttcgacatcttttacgatgtcaaaaatcaccggaatggtacgcagacctttaaacaaaccgcccgcgccgttggtttcctgaccaagataaccatgacttaatggaatacgttcatccagttcacgcgccggtaattggccaacgcgcagttgggtagtaacgaaatcagcatctttcaatgcttcgcggcgatccagcgttttataaagcttcatcgggacgccagcgttatcaatcatccgttggcagagatcgaaaataatatccagtttcggtttaccaccttcgacatccaccagccataattcgctgaccggcaattcgtgataacgcttaataaatccttccagtaactccggggtatagctgctcccgccaccaatagtgacgacttttaatttctggctcataatttctcccttcagtacagaatactgatatctggcatatctgccccccggacataaataatccagcaacaggacagatatgtgaattgtcaggtataacgacttgctgattaaattcagtcaatttcttacgatagctcttaggcgtaaaggacgttaatttcttaaacgttttaataaacaaactcgggctactataaccggcctcaaacgcaatatccgtcacactatagttggtcatttccagttgttttttggcaaaattaatacggatttcattaataatctgcattggcgttttgccataatatcgttgagtcgctcgcgtcaaatattcctgacttttggcactcaacgccaccatattctccagcgcgctttcactaaactgctctttatcatgcatcttttctaccgtacttttcagccactgcggtacatcatcaatcacctgttcttcgcggtaatgacgtaaacggttaatgacataaaaagtaaccatctcaacaaactcttccagccctgtttcgcggaaattcaaactagaaatcactgtttccacataggtgagaaaagcgttattggtccggtatacctggctagcgacaaagcaataaggcaacaatggcaggtaatgctgctcaaaaaagcgtttactgatcccaacgttcaatatgcgcgtggcaccaaactcataaaaactttgatggtggctacctaacgaaataaaaacaaaatcgccccgttccagtaacacgcgcttaccgttaatctcctggaaataacgcccggttaataccagagtaaattcataatagtcgtgctgatgcagtccgctgatactctcagttttgttatagataaacacatggaagtttttgccattaaacaactgctgttctcgggcagtggcaatttccggcgcgttaatcactggctgcatcatcgactccttatgccttcagtttttcatgaagctcaattaattcagtaatcagttcacgcgcaagcatggacgtcattaaatgatcctgagcgtggaccagcaccagactcactttcatcttaccttcgcccgcatcgccttcaatcagtttcgtctgtaccagatgcgcttcattcaatgccatccgactctgatccatcatggcttttgctgcggcaaaatcgccctgcttcgcctgtttcagtgccgcatacgccaggctgcgcgcttgtccggagttgatgatcagccccatcaccacttcttccagctcttcagcttccgtttgcgtatcgggaatgttatcgagatccatcatacatcgttcctctcttttcttaccggcacgattacccgtaccggcatcgattaaaatttcagggcgttagcgatatcttcttcgctctcttctttatcaatcgcattttgtgctttgttagccaccacaacaaagggcagataaattaacgttgcgatgccaaggttgaagagtgcgaccagcaatgcggcgacgctaccgttggtgttaaagaaggctcccagaccggttggcatggtccacggtgcaatattggtcaccggaggaataatgcccatgtagtacgctgcgagggtgattgccgccagaatcggttgtaccagtacaaacgggataaacatcaccgggttcatgataattggcagaccaaacagaatcggttcgttaatctggaagatgccggacggcagcgccagttttgccacctgacgataatcagcacggcgagaggcgataaagatagccaggatcaggcctaaagtcgcaccactgcccccaaggaaaataaaggagtccagcatcggcttggcccagatatggaaggtcttaccggctgccagcgccgcttcgacggaaccatattgctgataggtcgcgatattttccagtgcccacggcgtcataatgccgttgtccagtgcggtcagcgccagcgcgccatgaataccgaagaaccagagcagtggaacaaagatcacataggcccagcccaccacgctacccaagcttgccagtggggtactgatggtatccataatgatctgatggaagttggtgccccaggtattcaacgcccaggcaataatccccatcacggaaagaataataaagccgggaattaatgcgctgaaggaacggcttacactagcaggtacgctgtcgggcagtttaatgacccaattgcggcggacaataaaggtaaacatttctgccaccaccaggccaataataatcccggagatgatattcgccccacctaaccagtttgcaccaaccgcataggcctcaccgacactatatggggtgacggtcataaatgctgcaacggataacaacccagccgccagcgcatcgactttacgctcttctgccagcgccatgccaataaagaacggtgccattaaagacattattcctaatgttccgttatatacgttgccgccaatacctttcagaccattaagtgtttcaatggtactggcgtcgaggcgaatacctaaggaataaaaaaagctcccctccccaaagcttagaaaaacgttgttaattaatacaaacatggcccccgcaagggttaacggcattaagcgaataaagccatttttgattgcattaacgtgtggctgctttcctattttaactgcaaaagggaggagtaccttttcaaggcttgcaataacattactcatagaaaaatacccttaaaaaccgcaatttaaatattgcggtattgatttatgaaataactctttgacgggaaaatttaaaataaattaatttgctgcggcttttttaatcgctgcaaccgcagccttaagcacgcctaaaccatcgactttgccataaagcaggctgtcaattacttcaaccggtttgttgggtaacaaacgctggatttcgggcaacatataagcaatctgcggccctaataacacgacatcggcattctgacctttttcaccagccagtgtttccggaaatgcttcaataatgaccggaacttcatatttttctgcctgtgcgcgcattttacttaccagtaaagaggtagacatgcccgcagaacaaaacagataaatgtgtttcttttccataaaactgccctcatcgacgattatctgtcagccagacactccgcaagccttaacctgcttccatgctctgggtaacttgcgaaaccaacatgactttttttgtggctgaaaggagtatacggtatagacctgagcaatagtatttctttgaccttataaattgtttctccttgacctgtggttatgaccctcttcacatttcgggcaaataattcgcgaagataattaagaactcaggccaaaaaaaaccggcgcaatggccggtttccgttgttactcaagctttcagacgaattgattacttcgcagcctgtggatcagtgtcgtattcagcacaggtctgataaccggagttgatgacatatccggtatcatctaacgcgacaaagtaggtttctgctttaccatcacgttgacccaggatgtaggtctggcaagtaccgcgagcatggatcatgctcacttcagagctaggtttacccgcaatttgtgcaacctgcgcccggctcatgccttttttgacgtctttcaccacaggctgtacaaactggtctttggtacgatcataagccgtacaacccgccagcatggttaataccgccgctgcactcagaattcctgccatattcttgttcatattccgtcctcttgtttatcagcgtgttagataagcctggaatacattgggcgctttttcaagcccgtgaacgaaacggctccgctttcagaggattcctgtatgacgttttaaccaccattcagcccgctgtcgcttgtcgtttcagtagcaacgggttagctttaaggaagttttgtcttttctgtctggaggggttcaatgacattgcaacaacaaataataaaggcgctgggcgcaaaaccgcagattaatgctgaagaggaaattcgtcgtagtgtcgattttctgaaaagctacctgcaaacttatccgttcattaaaagtctggtgctcgggatcagcggcggtcaggactccacgcttgccggaaagctgtgccagatggcgattaatgagctgcgcctggaaaccggcaacgaaagtctgcaatttattgccgtacgcctgccctatggtgttcaggccgacgaacaagattgccaggatgccattgcctttattcaaccggatcgcgtattaaccgttaatatcaagggcgcggtattggccagcgaacaggcattgcgggaagcaggcattgaactgagcgattttgtccgtggcaatgaaaaagcgcgtgagcggatgaaagcacaatatagcattgcgggtatgaccagcggtgtcgtggtgggcaccgatcatgcagcagaagccattaccggattcttcactaaatatggtgacggcggtacggacattaatccgctgtatcgtctcaacaaacgtcagggtaaacagttactggcggcattagcttgcccggaacacctttataagaaagcgccaacggccgatctggaagatgatcgcccttctctgccagatgaagtggcactcggcgtgacctatgacaatatcgacgactatctggaagggaaaaacgtacctcaacaggtcgccagaacaatagagaactggtatctgaaaaccgaacataaacgccgtccgccaattaccgttttcgatgatttctggaaaaagtaataatttgcacatattggattgtgcgaaaaagagtaatttgttcacgccggatgcggcgtgaacgccttattcgacctataaaactatgcaaattcaatacattgcaggagtcgaataggcctgacaggcgtagcacgtcagacggtgtaacctttgtcatcgacccgcctcttttttaatcgcttcccgcctgttacactggatagataaccagcattcggagtcaacagtggtacggcgtttaacttctccgcggctcgaatttgaagctgcggcaatttatgaatatcccgaacatttacgtagtttccttaatgacttacccacccgaccaggggtgtatctgtttcatggtgaaagtgacaccatgccgctctatatcggcaaaagcgttaacatccgcagccgcgtcctttctcatttacgtaccccggatgaagccgccatgctacggcaatcccgacggatcagctggatatgtaccgccggtgaaatcggcgctctgctccttgaagcgcgattaatcaaagaacaacagccgctgtttaataaacggttgcgccgcaatcgccagctctgtgccctgcaattaaatgaaaagcgcgtcgatgtggtgtatgccaaagaggtggattttagtcgagcccccaacctgtttggcctgtttgccaataggcgcgcagctttgcaagcattgcagaccatcgctgatgaacaaaaactttgttatggcctgctgggactggaaccgttaagtcgcggtcgtgcatgttttcgtagtgcgctaaaacgttgcgccggagcatgctgcggtaaagagagccatgaggaacatgcgctacgcttgcgccagtctctggagcgtttgcgggtggtgtgttggccttggcaaggggcggtggcgctgaaagaacagcacccggaaatgactcaatatcatattattcaaaactggctgtggctgggggcggttaatagcctggaagaagcgacaacgttaattcggacacccgccgggtttgatcacgacggttataaaattctttgtaagccgctgctttccggtaactatgaaattactgaacttgatccggcgaatgaccagcgagccagttgattactgaacttgatccgggctatgaccagcgagccagttgatttcactgaacaacagtttaccttgcggttgtaaaagccgcagggtgtgcctgccatcgaaccagcacgcgccctggtcggtagtgagcaatttatcgcccagttgccacgccccgttaatcacaaacaccaccccgccgcgactgccaaaggtagtaaacgtacgttcggcaattctgactttcgccttacagacatccaggcgtgtcatgatgttgaaatccatgctcatctgccctgccgtcagtttcgcttttaccacctggtccgctgcaaaggcaaaaggctggaacggttttaaggtatggttaaagcggtctgcgctttcaaggagcatctcgccgccttccagcaacgtcactatcctttccatgccgggaaacaaagaaaactccccattcgccgcgatggatgcaatgctggcacgccagtaaaaatcacgttttgccggtgggaacgtgcaaatttcgcgcgtttcaccggcagcatttcgccacagattcacgctcattttacgcatatcaaagtattccatactcgctcccggcccgttcttttcattgttatcgttcaggtaaccgtggatggttatcggcaactcgggtgatttacgttagtggtgatcaggctttttttacaactgtttgagaagagaaaagaaaaccgccgatcctgtccaccgcattactgcaaggtagtggacaagaccggcggtcttaagttttttggctgaaagattattcagcagttgcaggcattttaccttttgccgctggacgttctgtcagacgcttctcaaaattagcattaaattgctttttctgttccggcgtcaggatgttgtaaattttgttctgggtttccatgtgcgccagcatgttagctttgcgctgttcttccatttttgcgatctgcgcttcagcttttactttatcgaaggtatcgctggcaatgatgtcatgcattgcgcggcgttcttccagcggcggacgtttcatctggtcacgctggcctttcatgatttcgcggatctgctgtttctgcgcgtcggtcaggttcaggtctttgaacatcatgtcctgatgcggaccgaacttgcctttgtggtgcatcatcggcttcgcgtcagccggtgctgcggtagtggtgtctgcggcatgggccaggttagccgcgccaagagccagggtagaggcaacaaacagtgcagttaatttacgcatattctatatccttcctttcagttatttattacggctttcttaagtagcgtgccgtgttgacgagattaactttactgactttagcgtcaattaatcagagcaacggtaaaacaatgaaagtgtaaaaaacacttttgcgccaattatggagaaaaaaagaaaatttgatggagagtgatgagagaatattacaacacgatgattttgcagagattatgaagaactataccggatgactggtgataaataaagcaaataaccaggattaatctgtattaatttataagaaagcaacttaatacccgcagaatgatttctgcgggtaagtattagcttattttttcgagcattaatcccgcgcgtaatcccaacgctaccaacggattagggaataacacatactctacatcatgggttacggtaaaacgttcctctccgtcctgcgccagcaatgttcctttctcaaacggcataaaattcagcgtgtcacttgccatatgcatttcgaaggacgggctgtggcgagtaatttggctaaccacccgataacggagcggcggtgttctcacgataccgacactctcaccagatagcagcgcagcaattgcgctggcagttactgcaaactggcgaagatcgttttgcccaaagggcaacgctttgccaagttccagcgtacaggccagcgcgccaaaatgtctggcgctgaaatgggtaaacgtaccaccaggttcctgatggaacaccagcgcctccagccccgccgcacccagccacgtcagaaatttctcgtcccagggaatgtcgcgttgcggtaatacaccgaactgcggatgcaaggagccacgaattgcggtatgtagatcaaggtgccagcgcacagattctttgccctggtcataaaaatcttccaggcactgttccagttcgcgcgcccgacaggtttctccgctttcagcaaatagctgccaacgaccgccaaacattcgattcatatcgctatggcaataacgtttcccttgcttcagcgcaggaggattcccgaggatcaccagcaaccgccaacgtaacgggatctcgccgtgagatatcgcgccaagcaacgcgtccagcatctccacaggtgccgtctcattaccgtgtattcccgcactaatcaccagtgcgccttgcggtggcgttaatggcgtcagttccagcacaccatcgcccagccagcgccagcgaacgccgttgatttctcgctcggtgataaccggttttttacccgttaaggtcagagcaagaaaattatccattgccccctccctcgcgctggaacggataaacgctaccgagattcagtaattggctcaatacatccagtgcttcccgcccttcgcgcagcaattgcgggtcggccagatcggcagcagtaaggcgatcgcggtagtaacgatccacccagtcattgagcgcattaaacagcgtatcgttcatcatcaccgccggattcaccgcccggcgttcttcttctgtcaataccacccgcaaccgcaggcacgccgggccgccgccattcgccatgctttcacgtaaatcaaagacttttagttcgctaatcgggttgtcagcggcaaggagttcattgagataaccccatactccggcgtgttcccgacactcctgaggcagcaccaacatcatggaaccatcatcgcggctcagcagttggctgttaaacagataggtagacaccgtatcagacacggaaacctgagttgccggaacttctatcgccataaaaccattgacccgcgcacgcaggtttgccagtaactgactctggcgagcgaacgcctgttggtggcaaaacagcacctggcggttactcacggcaatcacgtcattatgaaaaacgccctggtcgataacgtccgggttttgctgggcgaaaatcacctgttggggattcacctgattcagccttgccaccgcctcgctggcttcgcgagtctgtcgcgccggataacgggaaggccgggtatcattgccttcttctcgcccgtagacaaaaagttgcatacccggttcaccgtaatgaccgccgagacgattgtggtttgccgccccctcatcaccgagcaacgctacctgtggcaacgcgctatggacgctaaatttctcttcgtcgttaaaaatcgcttttaacaggctttcagtgacgggcgcttccaggctacggtgaaatttattgttcaggttggcaacggtgagatgcactttgccatccagcgtatcggcagatggcgcgatcgttgccgcattggctacccacattgggctagcggaactgacgctggaaagccagtgcggtgcctggcgtgcaactttttccagtacctgctcatcgctaccactgaatcccaactgacgcagcaccggaataaacggacgctcgtgcggcgggatcacggcctgggggaatcccgcatcggcaagggctttcattttcagtaagccctgcttcgccgccagtcgcgggttagacacctgaaaacggtgacgggtagaggcttcattaccaaagctcaggcccgcgtaatgatgcgtcagccctaccagcccgtcgaaattgacttcccaggcgttcatcgcaccacctcatcggaaaaatccagcccggggttaagcgtggcgggcaatgttaagctgtcgctctccaggctcgccatcggccatgcgcagtaatctgcggcataccaggcgctggggcgatggttaccggaagcaccaatgccgccgaatggcgcggtactggcagcaccggtaagcggtttgttccagttaacaatccccgcccgcgcctccagcaacagttgatcgaacttttcccgctcgggggaaaccagaccgcaagagagtccgaagcgagtgttattcgccattcgaatcgcttcatcgaaagtatcataacgccagacgcgcaataacggtccgaacacctcttcatctggtacgccagcaacgcctgtcatttcaatgatccccggcgtcagcaagcttgtccctgcttgtaataagcgcggcgcaagcaggggtcgtccgcccatcgcttccagttgctgccatgcagtaaccacctgctgtgcggcctgttcagaaatcagcccgccaataaacggctgcggttcgtcatcccagttgcccggcgttaatcgctggctgacggcaaccagacgagcaagaaacgcatcgccctgcgccccgcttttcagcaataaacggcgggcgcaggtgcagcgttgaccggctgtgacaaacgcgctctgaatggtcagatggacagccgcgtcgatatccgccacctcatcgataattagcggattattaccgcccatctcaagggcgagaattttctccggctgaccggagagctggcgatgcaactggtagcctgtattggcgctaccggtaaacagcaaaccgtcgagatcctccagcgcactcagcgcctgacccgtttcacgcccgccctgcaccaggttcagcacgcctggcggcaagccagcctgctgccataaacgcattaccgcttcgccactccacggtgtcagttcgctgggtttaaagataatggtgttacctgccagcaatgccggaacgatatgtccgttcggcaaatgaccagggaaattatacggcccaaacaccgccagcacgccgtgcgggcgatgtcgcaggctcgccgcgccgtccggcatttcactacgctgctcgccggtacgaacgtgatacgccttaatacttatcgcgattttattgatcatcgccgtcacttcggttgccgcttcccagcgcggcttacccgtttctctggcaataatcgcggttaattcggctttattgctttccagcagtgcggcaaagcgttcgacaacggcatgacgttcagcaaaactaagccgcgcccagcgcggaaacgccgcacgggctgcccgacaagcctgctcgacctgagcggcatcggcatcattgccttgccataacacctcgccgcttaccggattacgcttcacacggcttgcgccctggcccgttatccagtcaccgttaatccataaagtcatgctgttttctcctctgcgcacaggcgcaccagacgaacgcgatccccggcgtggcatttgagggcatccagttgtgcggcggttaaaatcaaacgctcggttgccggatcggtacgcaccagcaccacgcggaaatggtgataattttcattggcgaccaggcaggctgggaaatcgccctgcgcaggctgcccttctgccacttccaccagccgacttttacggatggcgcgcacgcggtcgatgtcacactcaagcgtcggcccaccgtcaaagatgtcgatatagttacggtagcgaaaaccttctttctccagcaccgcgcgggcaggcgcggtttgcggatgtacctgaccgatgacgtcctgggcttcctgggataaaaagtgggtatagatcggatgtttcggcatcagttctgcaataaatgccttttgcccggtgccgcagagaaaatcggcgcggctaaaatccatgctaaagaagcgtttaccgaggctttgccagaacggactatagccgtgttcgtcaatcaccccgcgcatttcagcaaccactttgtcattaaacttgtcgcgaaaagccgccataaacataaagcggcttttgctcagcaaatagccgttgccctctttgcgccagtccgggtcgagaaacagcgtgcacagctcgctgctgccggtgtgatcgttactgagaaacagcgtcggcaatgcgttatagacattcagctctttactggcgtgaaccaacgtgccgacgcgatagttgtaccagggatcgttcagcccaaccgccacctcaatggcacaaatccccgccacggtgcctgtctcgctatcttccagcacgaacacatagccctgctcacttttgggcagttcgccttgccaggttttgattgccctttcgatacgcgcgctaagcgtggcttcattggcgggaaggctcgtcaggccgccgcccgttttgctggcaagctgcatcagcgcgctgacatcacttcgctcaacgggacggatgaccatcatgatgaacctcggctaacaaattatttcaactactacctcggctaacaaagtgttcgcaagcagctgcaaagcgatccagtccggtcgtcacctcttcttcgctgacattgagcgcaggcgcaaaacgcaccacgttgccacccgcaatcagtaccatcacgcctgctttcgccgcttcctgagagatctgtttcgcttgcccggcgtaatcggcattcagtacacagccaatcagcaaacctaagccgcgaacttcactgaacaaaccatagcggtgattaatagtattaagacgctcaacaaaccagtcgtgacgctgtttaacgccattaagcatctctggtgtgttgatgagctccagcactttgcctgccaccgcgctggccagcggattaccgccataggtggtgccatgagtgccaacggtcatcacgcgggcgcactcttcggttgccaacaacgcaccgaccgggaaaccgccgcccagcgctttggcggtagttaacagatcaggcgtcacgccgtagtgcatataggcatacagttccccggtgcgcccgacgccggtttgtacttcatcaaaaatcaacagcgcattgtggcggttacacaattcacgcagaccttgtaaaaacgcgttgctggctggcaccacaccgccttccccctggatgggttcgacaatcaccgcacaggtagagtcgtcaatcagcgcgctggcagagttaatatcgttatatgcagcatgacgaatatccgccggcagtggcgcaaaatcctgactataggctggctgcccacccgcactgacagtaaacagcgtgcgaccatgaaacgcatttttgaacgccacgatgccgctcttatggctgccgtagcggtcgtgagcgaatttacgcgccagttttagcgccgcttcgttggcttccgcaccggagttacaaaagaagacgcgatcggcaaacgtggcgtcgatcaattttttcgccagtcgcagtaccggctcgttggtgtaaccgttgccggtatgccagaacttactcgcctgttcgttcagcgcttcacgcagttccggatgcgcatggcccagcgcgttcaccgcaatgccacccgcgaagtcgatatactctttcccctgctgatcccacaagcggctaccttcgccacgtaccggtataaagggtgccggagcgtaaacaggtatcatccattcatcaaagttttcacgcgtaattggctgagacatagcgacctctacagtaaataattcgttatttatatgttaataataagtaatgtttgcgctgtaaatgtagattgcagggttcgtgccagccagtgataaaagtgcataaacggcggaggctaactggaaatcaaggagttataaccaaaccatatgcatttaaagtgcatataaagtgaatacgtttgcgatgtgggtgaataaaaagaataaaaaacgcaatgttatgcagaagtaaaatataattctggaattgtgatcattgacgaaatttactggaaattactgcgccattctgacgcagcgcgcaccaaaagcgggcatttttttgcgccatcgttgacatcattaacaaccatcgatcaaatcacttaacaacaggcggtaagcaacgcgaaattctgctaccatccacgcactctttatctgaataaatggcagcgactatgaaatttgtctcttttaatatcaacggcctgcgcgccagacctcaccagcttgaagccatcgtcgaaaagcaccaaccggatgtgattggcctgcaggagacaaaagttcatgacgatatgtttccgctcgaagaggtggcgaagctcggctacaacgtgttttatcacgggcagaaaggccattatggcgtggcgctgctgaccaaagagacgccgattgccgtgcgtcgcggctttcccggtgacgacgaagaggcgcagcggcggattattatggcggaaatccccagtctgctgggtaatgtcaccgtgatcaacggttacttcccgcagggtgaaagccgcgaccatccgataaaattcccggcaaaagcgcagttttatcagaatctgcaaaactacctggaaaccgaactcaaacgtgataatccggtactgattatgggcgatatgaatatcagccctacagatctggatatcggcattggcgaagaaaaccgtaagcgctggctgcgtaccggtaaatgctctttcctgccggaagagcgcgaatggatggacaggctgatgagctgggggttggtcgataccttccgccatgcgaatccgcaaacagcagatcgtttcagttggtttgattaccgcagtaaaggttttgacgataaccgtggtctgcgcatcgacctgctgctcgccagccaaccgctggcagaatgttgcgtagaaaccggcatcgactatgaaatccgcagcatggaaaaaccgtccgatcacgcccccgtctgggcgaccttccgccgctaatttagcagctctcctggctcaaactgggtcaggagaattaaccttgagaaaaatcaacaaactgtcagtaatgatttgttgcctgccgtcctttgttataccgtctctgcgtttttagttgtctgaccacttctctattatcaagtttgatataggaaactccacgatgaacgctgagcgtaaatttctttttgcctgtcttatttttgcgctggtcatttacgctatccacgctttcggtttattcgatctgctcaccgatttaccccacttacagacactcatccgccagagcggatttttcggctatagcctctatattctgttattcatcattgccaccctcttgctgttaccaggaagcatactggtgatcgcgggaggaatagtttttggcccgctcttagggacactactcagtttaattgccgccacgctggcctccagctgcagtttcctgctggcgcgctggctgggacgtgatttactgctgaaatacgttggccatagcaataccttccaggccattgaaaaaggcattgcgcgtaacggtattgattttcttattctgacccgcttaatcccgttgtttccttacaatattcaaaattacgcttacggattaaccacaatcgccttctggccttatacccttattagcgcactcacgaccctacccggtattgttatttataccgtgatggcaagcgatctcgccaatgaaggcattacgctgcgctttattttacaactctgtctggcgggcctggcgctgtttattctcgtccagctcgcaaaactctacgcccgacacaaacatgtggatctgtctgctagccgccgcagcccacttactcacccaaaaaatgaaggataaaacgatgttgcaacattatagtgtgagttggaaaaaaggactggctgcactctgtttactggctgttgctgggcttagcggctgcgatcaacaagagaatgcggcggcaaaagtggaatacgacggacttagcaacagccaaccgctgcgtgtcgatgccaataaccatacggtaaccatgctggtgcaaattaatggtcgtttcctcaccgacgacactcgtcacggtattgtgtttaaagatggctccaacggacataaaagcctgtttatgggttatgcgaccccgaaagcattttatgaagccctgaaagaggcaggtggtacgccgggcgaaaacatgacgatggataataaagaaacgactcatgtcacaggcagcaaactggatattagcgtcaactggcaaggggcggcaaaagcgtattccttcgatgaagtgattgttgacagtaatggcaagaaactggacatgcgctttggcggtaatttaacggcagcagaagagaagaaaacgggttgcctggtgtgtctggatagctgcccggtcggcatcgtcagcaatgcaacatacacttatggtgcggttgaaaaacgtggtgaagttaaattcaaaggcaatgccagtgttctcccggcggataacacgctggcaacggttacctttaaaatcgccgaataaagccaggataaaggatgatgatgatgcaaagccgaaaaatctggtactaccgtataaccctcatcatcctgttgttcgctatgctgctggcatgggcgctgcttcccggcgtccatgagtttatcaatcgcagcgttgcggcgtttgccgccgtggaccaacagggtatagaacgctttattcagtcttacggcgcactggcggcagttgtcagcttcttgttgatgattttgcaggccattgctgcaccgctacctgcgtttttgatcacctttgccaatgcgagcctgtttggcgcgttctggggcggcttgctgagctggaccagtagcatggccggcgcggcgctgtgcttttttatcgccagagtgatgggccgcgaagtggtggaaaaattaaccggcaaaaccgtgcttgacagtatggacggctttttcactcgctacggcaaacacaccattctggtctgtcggttattgccttttgtccctttcgatccaatcagctatgctgccggtttgactagtatacgttttcgcagcttttttatcgccaccgggcttggtcagttaccggcaactattgtttattcctgggcgggcagcatgttaacaggcggtactttctggtttgtcaccggactgtttattctgtttgccctgaccgtggtgatttttatggcgaagaaaatatggcttgaacgccagaagaggaatgcctgatgggtttaccgccgcttagcaaaattcctttaattttacgtccacaggcgtggctgcatcgtcgccattacggcgaggtgctaagccccattcgctggtgggggcggatcccgtttatcttttatctggtgagcatgtttgttggctggctggagcgtaaacgcagtccgctcgatccggtagtacgaagccttgtcagcgcgcgcattgcgcaaatgtgcctgtgtgagttttgtgtggatatcaccagtatgaaagtcgccgagcgcaccggcagcagcgataaactgctggcagtggctgactggcggcaaagcccgctctttagcgatgaagaacggctggcgctggagtacgccgaagccgcaagcgtaacgccgccaacggtcgatgatgccctgcgtacccgactggctgcgcattttgacgctcaggcgctcaccgaactgacggcattgatcggcctgcaaaatctgagtgcccgttttaattctgccatggacattcccgctcaggggctgtgccgtattcctgaaaaacgttcttaaggagagatgatgcgccattgtgggtggttgctgggattgttaagcctgttttctctggcaacacatgccagtgactggcaagaaattaaaaatgaggccaaagggcaaaccgtctggtttaacgcctggggcggcgataccgcaattaaccgctatctcgactgggtgagcggcgagatgaaaacccattacgctataaacctgaagattgtccgtctggcggatgccgcagacgcggtgaagcgcattcagaccgaagccgcagccggacgtaaaacgggcggcagcgtggatctgctctgggtgaacggcgaaaacttccgcaccttaaaagaggccaatttattacaaacgggctgggcggagactctgcccaactggcgctatgtcgacacacagctgccggtgcgggaagatttttctgtgccgacacaaggtgcggaaagcccctggggcggcgcacaactgacgtttatcgcccgccgcgatgttacgccacagccaccacaaacgccgcaagccttactggagtttgctaaagccaatcccggcacggttacctatccgcgcccaccggactttaccggcacggcgtttcttgaacagttgctgattatgctgacgcccgatcccgccgcattaaaagaagcgccggacgatgcgactttcgcccgtgtcactgctcccttgtggcaatatcttgatgtgctgcatccgtatttgtggcgcgaaggaaaggatttcccgcctagtcccgcgcggatggatgctctgctgaaagccggcacattgcgcctgagcctgacctttaaccccgcgcatgcgcagcaaaaaatcgccagcggcgatttgcctgcaagcagttacagttttggctttcgcgaggggatgattggcaacgtgcatttcgtcaccattcctgccaacgcgaatgccagtgctgcggcgaaggtagttgccaatttcctgctcagtcccgatgcgcaactgcgtaaagcagatcccgctgtctggggcgatccttctgttctcgatccgcaaaaactgcctgacgggcagcgcgaaagtttgcaaagtagaatgccgcaggatctgccgccggtactggctgaaccgcacgcaggttgggtaaatgcgctggaacaagaatggctacaccgttacggtacgcattaatctttttgctgtgggcgatggtggcggtgatttatgcaccgctgatcccggcagctctcacgctgataagccctgctttgagcttgacacactggcaggcgttatttgccgatccacagttaccgcaggcattactggcaacgctggtgagcacaaccatcgcggcggtcggggcattgttgattgccctgctggtgattgtggcgctgtggcctgggccgaaatggcagcgtatgtgcgcccgtctgccgtggctgctcgccattccccatgtggcttttgccaccagcgcccttctgctctttgctgacggagggctgctttatgactatttcccgtatttcactccgccaatggaccgatttggcatcggtctgggcctcacccttgcagtgaaagaaagcgcatttctgctgtggatcttagcagcagtattgagcgaaaaatggctgttgcagcaggtcattgtgctggatagcctgggctacagccgctggcaatgcctgaactggctgctgttgccctccgtcgcgcctgcgctggcaatggcgatgctggcgattgttgcctggagcctgagcgtcgtggatgtggcaattattctcgggccaggtaatcccccgacgctggcggtaattagctggcagtggttaacccagggcgacattgaccaacaaacaaaaggcgcgcttgccagcctgctgttgatgctgttactcgccgcctacgttttgctgagctatctgctatggcgcagctggcggcgcactattccccgcgtagatggcgttcgcaagcctgccacgcctttattgccgggcaatacgctggcgatttttttacccttaaccggtgtgctgtgtgtggttctgctggcgatcctcgcggatcagagcacgatcaatagtgaagcgctcatcaacagcctgacaatggggctggtggcgacattcatcgctttgctcctgttactgctgtggctggaatgggggccacagcgtcgccagttgtggctatggttgcccattttattacctgctctgccactggtggcgggccagtacacgctggcgctatggctgaaactggatggaagctggacggcggtggtctgggggcatctgctgtgggtgatgccgtggatgctgtttatcctgcaacccgcctggcagcgcattgatagtcggttaattttgattgcgcaaacactgggctggagccgggccaaaatcttcttttacgtgaaatgcccactcatgttgcgccctgtgctgattgccttcgcggtgggatttgcagtcggtattgcgcagtatatgccaacgctgtggctgggcgcggggcgttttccgacgctcaccactgaggcggtggcattaagcagcggcggcagcaacggtattctcgccgcccaggctttatggcaactgctattaccgcttattatttttgccctgaccgcgttagtcgcaaaatgggtaggttatgtcagacaaggactccgctaatgctctgcgtgaaaaatgttagcctacgtttaccagaaagccgcttgctgacaaacgttaactttacggtggataaaggtgacattgtcacgttaatggggccgtctggctgtggaaaatccactctgtttagttggatgattggtgcactggccgaacagttttcttgtacaggtgagctatggctcaatgagcaacggattgacatcctacccaccgcacagcgtcagattggcattctttttcaggatgcactgttatttgaccagttcagtgtcgggcaaaatttactgctggcgctaccggcgacacttaaagggaatgcccgacgtaatgccgtgaatgatgcacttgagcgtagtggccttgagggagctttccatcaggatcctgccactttgtctggcggtcagcgagcgcgcgttgctctactacgcgcccttctcgcccaaccaaaagcgttactcctggatgagccattcagccgtcttgatgtggctctgcgcgataattttcgccagtgggtgttcagcgaagttcgcgccctggcgatccccgtcgttcaggtaacgcacgatctccaggatgttcctgctgatagttctgttctggatatggcgcagtggagtgaaaattacaacaaactgcgataacgcaaagtttttctcaatgcgtcagttcagaatggcgcactcaaaactacaatgtcgggattttcgatgaaacgtgtttctcaaatgaccgcgctggcaatggctttagggctggcttgcgcttctagctgggccgctgaactggcgaagcctcttacacttgaccagcttcaacaacaaaatggcaaagcgatagatactcgccccagcgcgttttataacggctggccacaaaccttaaatggcccttctggtcatgaacttgccgccttaaacctctctgccagctggcttgacaaaatgagcaccgaacagctcaacgcgtggatcaagcaacataacctgaaaaccgatgctccggtggcgctgtacggtaatgacaaagatgtcgacgccgtcaaaacgcgactgcaaaaagcaggtttaacgcatatctccatcctgagtgacgcgctaagcgaaccttcccgtctgcaaaaactgccgcattttgagcagctggtttatccgcaatggctgcacgacctgcaacaaggtaaagaggttacggcgaaacctgccggtgactggaaagtcattgaagcggcctggggcgctcctaagctttaccttatcagccatattcccggcgctgactacatcgataccaacgaagtggaaagtgaaccgctgtggaacaaagtttctgatgaacaactaaaagcgatgctggcaaaacacggcattcgccatgacaccacggtcattctgtatgggcgtgacgtatacgctgcagcgcgtgtggcgcagattatgctttatgctggtgtgaaagatgtgcgcctgctggatggcggctggcaaacctggtccgacgcgggactgcctgttgagcgcggaacgccaccgaaagtgaaagcggaaccggatttcggcgtgaagatcccggcacaaccgcagttgatgctcgatatggaacaggcccgtggactgctgcatcgccaggatgcaagcctggtgagcattcgtagctggccagaatttatcggtacgaccagcggttacagctatattaaaccaaaaggtgaaatagccggcgcacgttggggacacgctggtagcgacagcacgcatatggaagattttcataacccggatggcaccatgcgcagcgccgatgatattaccgctatgtggaaagcgtggaatatcaaaccagagcagcaagttagtttctactgcggcaccggctggcgcgcgtccgaaacctttatgtacgcacgcgccatgggttggaagaatgtttccgtgtatgacggcggctggtacgaatggagcagcgatccaaaaaatccggtagcaaccggtgaacgcggcccggacagtagcaaataacattgcaattactgacgctggaggctcttcagcgtcagatacccactccacacccgcgtaaaggtcgtcatccagcacaacgcaccgaagatccacgcaaaccacgcaaaccatgcagggaataaacatcccagcacaaacagtaagatcgtttctgtgccttcggttaatccccccagatagtaaaagctcttatgtgcataaccggggttatcaatctgatgttttgctgccagtgcagcaaaggcgagaaaactgctgcccgtgccgataaacgcaaacaacaaccagccgcctgccagcgcattttgctccggtgcagcaagaataaagccaaacggcaccagcgcgtaaaagagaaaatcgagagaaatatcaagaaagccgcccgcgtcggtaagctctctgcgccgcgccagcgcaccgtccagaccatcaagcagcctgttcaacaaaatgacgactagcgccgccagataccagcccagcgccagaaacggcagagccagcacgccgatggcaaatcccactaatgttaaaccatctggcgtaatgcccggtttatcaagaacccgcacgcactgatgcaacaacggtttaatccggggatgaagatggcggtctagcacaggcactccttaaatataaagcctttctgattgagcaacagtgcggatattatggcatttttcgcttatctgcccgtgtgtaatttatgaaaatgattgaagttgttgccgccatcattgaacgtgatggcaaaattttactcgcgcaacgccccgcccagagcgatcaggcgggattatgggagtttgccggtggtaaagtcgagccggatgaaagtcagcggcaggcgctggtgcgtgagttacgcgaagaactgggcatcgaagcaactgtgggtgaatatgttgccagccatcagcgagaagttagcgggcggattatccatcttcatgcctggcacgtacccgacttccacgggacgttacaggcacatgaacatcaggcgctggtctggtgcagtcctgaagaggcgctgcaatatccgctggcccctgctgacattccattattagaggcgtttatggctttacgcgccgccagaccagcggattaattatggctttacgcgccgccagaccagcggattagtgctaagggttttgtcatcacgctggcattgcagcagtattccttcggctttaattaccgccccttcagaataattttgatcctgataaacgcagcactgagtacagggctgcgcactctgcccgccactactgaacacttctggcggtacgtttacctccacgtccggacgataatgcgggttagccagtgcaattaatggaaatgctaatactacggcgaacaatgctcgactcacagggaactccttaacgttattgtctctgctactgataacggtagccgggtggcaaaactttagcgtctgagttatcgcatttggttatgagattactctcgttattaatttgctttcctgggtcatttttttcttgcttaccgtcacattcttgatggtatagtcgaaaactgcaaaagcacatgacataaacaacataagcacaatcgtattaatatataagggttttatatctatggatcagacatattctctggagagtttcctcaaccatgtccaaaagcgcgacccgaatcaaaccgagttcgcgcaagccgttcgtgaagtaatgaccacactctggccttttcttgaacaaaatccaaaatatcgccagatgagtttactggagcgtctggttgaaccggagcgcgtgatccagtttcgcgtggtatgggttgatgatcgcaaccagatacaggtcaaccgtgcatggcgtgtgcagttcagctctgccatcggcccgtacaaaggcggtatgcgcttccatccgagtgttaacctttccattctcaaattcctcggctttgaacaaaccttcaaaaatgccctgactactctgccgatgggcggtggtaaaggcggcagcgatttcgatccgaaaggaaaaagcgaaggtgaagtgatgcgtttttgccaggcgctgatgactgaactgtatcgccacctgggcgcggataccgacgttccggcaggtgatatcggggttggtggtcgtgaagtcggctttatggcggggatgatgaaaaagctctccaacaataccgcctgcgtcttcaccggtaagggccttagttttggcggcagtcttattcgcccggaagctaccggctacggtctggtttatttcacagaagcaatgctaaaacgccacggtatgggttttgaagggatgcgcgtttccgtttctggctccggcaacgtcgcccagtacgctatcgaaaaagcgatggaatttggtgctcgtgtgatcactgcgagtgactccagcggcactgtagttgatgaaagcggattcacgaaagagaaactggcacgtcttatcgaaatcaaagccagccgcgatggtcgagtggcagattacgccaaagaatttggtctggtctatctcgaaggccaacagccgtggtctctaccggttgatatcgccctgccttgcgccacccagaatgaactggatgttgacgccgcgcatcagcttatcgctaatggcgttaaagccgtcgccgaaggggcaaatatgccgaccaccatcgaagcgactgaactgttccagcaggcaggcgtactatttgcaccgggtaaagcggctaatgctggtggcgtcgctacaagcggcctggaaatggcacaaaacgctgcgcgcctgggctggaaagccgagaaagttgacgcacgtttgcatcacatcatgctggatatccaccatgcctgtgttgagcatggtggtgaaggtgagcaaaccaactacgtgcagggcgcgaacattgccggttttgtgaaggttgccgatgcgatgctggcgcagggtgtgatttaagttgtaaatgcctgatggcgctacgcttatcaggcctacaaatgggcacaattcattgcagttacgctctaatgtaggccgggcaagcgcagcgcccccggcaaaatttcaggcgtttaactgtatttaacggaacttgctccccacggaacatttcttatgggccaacggcatttcttactgtagtgctcccaaaactgcttgtcgtaacgataacacgcttcaagttcagcatccgttaactttctgcgatagcagcagatatgccagtaaagaaatcccatttgactatttttttgataatcttcttcgctttcgaacaactcgtgcgcctttcgagaagcaagcattatataatgccaggccagttcttcttcaattgtcccgttttgaaaagctgtgctacttatgctgatcatccaacttaattccgccgcccatattagcttcgcgctggatttaccggagctatgattagcgcaatcagagatatagtcactgggaaaaacagcaaatttattcaacaaggcgataacctgctctggggcttcctccatgtttgctttaaaggtattggctccatggtcgccagaaagaaaatgctccattaaggcacaataactttcgctatcttcgataccccattgatcctctaaagactcgcgtcttttacttatgatatcgatgctgtcaaaaggaagcacatgatattggaaggtatctttgccaggttcaggctttcgcggccagaactccagcgtttcagaccattgcttatgatagaatcgataaggtgcgatcaattgtagcgcctgtaacttctcgatactgagcggctcaatacctttagcctgataataatgcagttgttctttttttgctttaaaaccggcccgaacaataagccccatcataattaatagataaagaaaagagcatcccgcggtaatcaggcctctttcattcaaaccgttggatgttatcgctgcgaacacaaacattacagcgacaacacatgttaaataaaacccccacttacaaagcagcatggccttattttctttaatcatccgttcaaaattactattaaatatttcccagccattaaaagaatacttctcgctcccaggatggttttgtaataaaacttttttcatcacattccctgttattacatactttagaggcgataattttatccatgcaaaaaaaatatccaacgaattttcttgatccgctggatatttcagaatatgactcgaatagcacgaaagattcactcgcttacgctatcgccccgcttccgacttcatctgctggcggactttttttcgcactacgtttacgcggtgcagcctttttcttatcagcactgccaccactgcccggagccacaatgccgcgaaactgccgcaccggcgtacgtttggcttgatcaataagctgatatagcgtccccaccagcggctgcataaagtcctgatagcgacactgcttttcgctgatttgcgtcagcacgctttcccagtgcgcggtcatgtccggtcgcgtcgccatctccggcaggctatggaatagcgcttttccggcgtcggtggagtggatatagcgcccttttttggtcaggaaaccacgcttgaacaacagttcaataatcccggcacgcgttgcctctgtccccagaccatcggtcgcacggaggatctttttcagatctttatcctgcacaaagcgcgcgatcccggtcatcgcgctaagcagtgttgcatcggtaaaatggcgcggcggctgggtttgccgctctaccacttcacctttttcacacagcaactcatcgcctttcgccaccacaggcagtggcgtgccgtcgttttcttcatcgcgctctttgctgcctaacagcgtgcgccagcctgcttcagcaagaaaacgcgctttagcgacaaatttgcctttggcaatgtccagttcgataacacacttgcggaacaccgcatccgggcagaattgcatcagatactgacgggcaatcaggttatagaccttcgcttcgttctccgtcaggttgatcgcagaactccgtgcggtcggaatgatggcgtggtgcgcatcgacctttttgtcatcccaacagcggttgcgtatatctggatctaccactggctgcggcaacagatccggtgcatgaacactgatggcattcatcaccgcgtggcgtccggcaaaatgttcttctggcaaatagcgacaatcagaacgcggataagtgattagcttgtgcgtttcgtacagtttctggcagatatcaagcacgttctgcgcactcagaccaaaacgttttgccgcttcaatctgcaacgcactaaggctaaaaggcagcggcgcggattcactttcccgtttatcgttatagctggtgacaatagccggttgaccactaatgcggttaaccacatgctccgccagtggacgatgtaacaagcgcccttcttcatcctggtacggttcacacgcttcgctcggttgccagatagcggtaaaccgctcatcggcaggtgtcacgatatgtgctttgacttcaaagaagtctttcgccacgaagttttcaatctcttcatcgcggcgcaccaccagcccaagcacgggcgtctgcacgcgtcccacggaaagtacgccctgataaccggcattgcgaccgagaatggtatacgcacgggtcatattgatgccgtacagccagtcggcacgcgctcgcgccagcgcagaaacgcacagcggtacaaactcactgttggaacgaagacggtcgatcgcccgctcaaccgcctgcgggttcaggtcgtttatcaagcaacgctgtacctgctggcgcttttccggtgccagttgcagatagtccagcacttcatccaccagcaattgcccttcacgatccgggtccccggcgtgaacgatttcgctggcttcatgcaggaaccgtttgatgacgttaagttgtttggtcacggagggtcggggctgtaattgccacttttccgggacaatcggcaaatccgcaagattccagcgcgcatagcggctgtcgtaggcgtctggctgcgcctgctcaagcaggtgaccgatacaccaggtcaccacctgaccattaccgcactcgataaagccatcgcctttccggtgcggtttgggcaggacatcagcaatggcgcgcgccagactcggtttttcggcaataaacaaccgcattgaattaacgaatctcaaccatggcacgaccgccgcgcgctggcaccagttcgccaattgccgtcagttcaatgccaaactcggcggctgtagctttgacctcattttctgcttccggcatgaccgccagcagcaaaccgccagaagtttgcggatcacacagcagatcgcgcacttcacgcggcatttcacccatcagatgaccgtagctggcaaagttacgttcagtgccgccaggtactgcgcccaacttaatgtactcttcaacaccggggagtttcgggatcgcttcatagtcgacgcgtgcctgcacaccagccccctgacacatttcgctcaagtggcccagcagaccaaagcccgtaacgtcggtcatcgcttttacgccttcgatgttggcaaaggacgcgcctgcgatgttcatccggcacatcacttccgtcgccagtccctgatgttctggtttcaacagactttttttctcagccgtggtaagaacgccgatccccagcggtttcgtcaggaacagtttgcatccggcttgtgcggtactgtttttcttcacccgctcggtcggtacgatccccgttaccgccagaccaaaaatcggctccggcgcatcgatggagtgaccgccagccagcgcaatacccgcctgacgacatgcatagcgtccaccttcggtcacttcgcgggcaatttctggggaaagtttgttaatcggccagccgaggatcgcaatcgccataatcggtttgccccccatcgcgaagatatcgctgatggcgttagtcgccgcaatgcggccaaaatcgaaaggattatcaacgatcggcataaagaagtcggtggtactgataacgctggtgccattgcccagatcgtacaccgccgcatcgtcgcgggtttcattacccacaagcaaattcggatcaacaaacttcgcctgctcactatgcaggatggtttccaacacttttggggaaattttacagccgcaaccagctccgtggctgtattgggtcaaacgaatgctgttctcgctcatggacatctcctgtcaatgcaatccgggtatggtaaccctcattccgtgaagtgataagtgagagtgtctgaattcctgcgcctttgctcacaatccagacagtttcgcgacaattatcagaaataagttacaaacggcgtcgggtccgggacgttaatgctcgtagatgctttcagctgcggcgtaccgaggtagagaaaaccgacaattttatcctgctcacggcaaccgaatgcttcacgcactaccggactttcagttaatgcgccactgcgccagatgccgccaaacccctgggcaactgctgccatttgcatcgccatgaccgcgcatccggcagacatttcctgttcccagcgcgggactttatgattctcttcgcatttcgccaccaccgtgatgatgagcggtgcgcggaacggcgcattacgggctttgtcgatagctttgtcatcactaccggcagcaatcgccccctgttccagtacggcgctgaaacgctcgcgcccttccccttcaatcacaaaaaaatgccacggttgcatggacttatggtccggcgcacgcatacccgcacgcaggatgttttgcagttgttcacccgttggcgcgggttcagccaagcgggaggcgctacggcgattgatcaatagttcgagtgcatccatttgattaactcctgtcgtgatatttattcacaaaattaacacgagagtggattttgttacagcacagtccgcaattcctgctgacaagtaccggttgggtcattacgataaccacatctattgcgcctgtgacaggtgtgaccttaagttgggagaatacatgcgaaccctttggcgatttattgccggattttttaaatggacgtggcgtctgctgaatttcgtccgtgaaatggtacttaacctgttctttattttcctcgtactggttggtgtggggatttggatgcaggtcagtggtggtgatagcaaagaaacggccagtcgtggcgcactgctgctggacatttctggtgtgatcgtcgataaacccgacagttctcagcggtttagtaaattaagccgccagctgcttggtgccagttccgatcgtctgcaggaaaacagtctgtttgatatcgtcaacactattcgccaggcgaaggacgaccgcaatatcaccggtattgtgatggatctgaaaaacttcgcaggcggcgaccaaccgtctatgcagtacatcggcaaagctctgaaagagtttcgtgacagcgggaaaccggtttatgccgttggcgagaactacagccaggggcaatattatctcgccagtttcgccaataaaatttggctgtctccgcaaggcgtggttgatctgcacggctttgccaccaacggtctgtactacaaaagcttgctggataagctgaaagtttccacccatgtgttccgcgtgggtacgtataaatctgccgttgaaccgtttattcgtgatgatatgagtccggcagcccgcgaagctgacagccgctggattggtgagctgtggcaaaactatctgaatactgttgccgctaaccggcagatccctgctgagcaggtattccctggcgcgcaagggttgcttgagggtttaaccaaaaccggtggcgataccgcgaaatatgcactggaaaacaagctggtcgatgcactggcaagcagtgcggaaatcgaaaaagcactgaccaaagaattcggctggagtaagactgataaaaattatcgcgccatcagttattacgattacgcattgaaaacgccggcagataccggtgacagcatcggtgtcgtctttgctaatggcgcaattatggatggcgaggaaactcaggggaatgttggcggtgataccactgcggcacaaatccgcgacgctcgccttgacccgaaagtgaaagcgattgtcctgcgtgttaatagcccaggcggcagcgttaccgcgtctgaagtgattcgcgctgaactggcagcagcccgggcagcgggtaagcctgtggttgtaagcatgggcggcatggcggcatctggtggttactggatttccacgccagctaattacattgtggctaaccccagcaccctgaccggttctatcggtatcttcggcgtgatcaccaccgtagaaaatagtctggatagcattggtgttcatactgatggtgtcagtactagtccgctggcggatgtttctatcaccagggcactgccgccggaagcgcagctgatgatgcagttaagcattgagaatggctataaacgctttatcacgctggttgctgatgcgcgtcatagcacgccggagcagattgataaaattgcccagggccacgtctggaccggtcaggatgcaaaagctaacgggctggtcgatagtctcggggatttcgatgatgcggtcgccaaagcagcagagctggcaaaagtgaaacagtggcatctggaatattacgttgatgaaccgaccttcttcgacaaagtgatggacaacatgtctggttctgtccgggcaatgttgccagatgcgttccaggccatgttacctgcaccgctggccagcgtagcctctaccgttaaaagtgaaagtgacaagctggccgcgtttaatgacccacaaaaccgttatgcgttttgcctgacctgcgccaacatgcgttaagtcttgtactgagtggccgacagatcgtcggccacattattttttacgtcgacgaatcctcttcccgctgtttcgccccatatttccttatccgcatagtatcaggtgcgctccccctgcctcacgtatatacttttgctctttcgatatcattcatatcaatatcatgcaaaagaaaagtatttacgttgcctacacgggcgggaccatcgggatgcagcgttccgagcagggttatataccggtgagtggtcatctacaacgccaactggcgctgatgccggaattccatcgcccggagatgccagatttcaccattcatgaatatacgccgctgatggattctagtgatatgacgccggaagactggcagcatattgctgaagatattaaagcgcactatgacgactatgatggttttgtcattctgcacggcaccgacacgatggcgtataccgcctctgcgctgagcttcatgctcgagaatctcggtaaaccggtcattgtgacagggagtcaaatcccgctggctgagttacgctctgacggacaaattaatctgctgaatgcgttgtacgttgcggcgaattatccgatcaacgaagtaacgctctttttcaataaccgattgtatcgcggcaaccgcactaccaaagcccatgccgatggttttgatgcgtttgcctctccaaaccttcctccgttactggaagcaggtatccatattcgtcgtttgaatacgccacccgccccgcacggtgaaggggaattaatcgttcatccaatcaccccacaaccaattggcgtagtgacgatttatccagggatttctgctgacgtcgtgcgcaattttctgcgccaaccggtgaaagcattgattctgcgctcctatggcgtgggtaatgcgccacaaaacaaagccttcctgcaggaattacaagaagccagcgatcgcggtattgtggtggtcaacctgacacaatgtatgtccggtaaagtgaacatgggtggttatgccaccggtaacgccctcgcccatgccggcgtaattggcggtgcagatatgactgtagaagccacgctaaccaaactgcattacctgcttagccaggaactggatactgaaaccattcgcaaggccatgagccaaaacctgcgcggcgaactgacgccggatgattaaggagactgtaatgccccctcgcgccctgttactggtcgatttacaaaatgatttctgtgctggtggcgcgctcgccgtgccggaaggtgacagtacggtggatgtcgctaaccgcctgattgactggtgccagagccgcggtgaagcggttatcgccagtcaggactggcacccggcgaatcacggcagttttgccagtcagcacggtgtagagccttatacgccaggccaactcgacggtttgccacaaaccttctggccagatcactgtgtgcagaacagtgaaggcgcacaattacatccgttactgcaccaaaaagcgatcgcagcggtgttccataaaggcgaaaatcctttagttgacagttacagtgccttttttgataacggccgtcggcagaaaacctctctcgatgactggttacgcgatcatgaaatcgatgaattgatcgttatgggcctggctactgactattgcgtgaagtttaccgtgctggacgcgttacagttaggttataaggtaaacgtgattaccgatggttgtcgtggcgtgaatatccagccccaggacagtgcgcacgcgtttatggagatgagtgcagctggggcaacgctatatacgctggcagactgggaagagacacaggggtaattttacgctggcctacaattctgtactggcattgtaggccaaataaaacacgtcagtggcacatctggcaattgatgccatcaacgaaagatttaattcacctcagaaatctcttccaagctcaccttccgcgtttcgatgccaaaaatggagagaaccagcgcacagagcaataacataacaccaagtaccataaacaccgtgatgctcccataatgtgttaataatgccgcaacgccatagggcgtgaagactgcgacgatccgtccgacggcattaacgaaaccgctaccgcgcaggcgtaaatgcgttggccaaagctccgggatataaaccgcgctcgcgaagcaaacatacatgtataaaaagaagatcatcaccagtccatagattaaaatcgcccactctgtagtctgaatactatagatatagcctaacacggcaataataataagtaaggtggagccaaataaccgacgaggaaaatgatcaataattaatgccgcaataaatattcctaccggagcgccaatcataataacagcggtcattaatatacttttatcgacatcaatgccggagttaacaaatatggtcggtatccatacggtgatggtataaaggctaatgttcattgcaattaaaacagtaatcgcgactaatgtacgtcgtaacatttcacctttaaacaggagccagaaagtacccttgattactttaaccttgctgttgctctgatagctagtaagcgggggtaaacgaatactcttctctctttcaatttgctgctctacttcacgaagttggcattctgcacctgcgatttgccctttccctgccagccatcgtgggctctcgataaagtatttaccactgagaaaccaggctaacagtatgccaataccacccagcagaaacattattcgccaactaaaaaaagcgataaccaccacgcctatcgccgcagacagcatggggctccagttaccaacaaaactgagccgcgcggaccattttccacgcaccgtcgcggggataaactccgtaaaactggcatagccaaccataatcagcgcccccattcctgttcccatcaggaagcgaaagaagatgagccagtacatatcagggacaaaagcggcccctgttgcagcaataccgacgatgagaagatttatgcgaaacgccctgcgccgcccaaagtagtcaccaataaacccaccagtaagactgccgatgaaataaccaaacattaatgcgctggtaaaggcggcattgaggaaattattactccatccattgcttaccagctttgctaagacgacattaccggagtaactcaaaaaccctgttaataacagactaaagcttataataccaaatatacgataatgaaaccgggccaaaggcaagcggtccagtcttgcgccaatttgatcatattgttccattaggtgcctcggatttgctaaaaaggtagcaattgcggcaaattcacttgccgcatctttatcatcattttatttcaaggcgcaggaacaaataatattgacaacgtgtgcttaaattaccacaccagctggatattattgtctttgcaaaatgctatccactctgcacccggacttttatcagttattatgtaattaatatgactaaaatcagctaactggacaaaagctttgcgatcaaacttagagtgatcaaccaataacgcaacttctgtcgcctgacggatcattgtctttttgatttcagcttccgcttcattagagtccagcgcgccgctgttaatatcaagacctttacaactcattaccatgatatcgacatgatagcgcctgatgatctctttagtaattcttccttgcagactaagtgtatttttgtttagttccccacccgtactaacgactttaatttcactctgagccagaacatgaatcgcttccgcgctgttggttagcaacgtcaggccactacggtcctgtaacaatttgagcaattccattacggtactactggaatcggctgccatggtggttttattgtcgataaagggtagtgccttgcgtgcaataagctgcttctcttcataaaagctactagcgcgcttataaaaatggatattctccgtcaacatcgctgtatttaaaacagcaccaccataggttctggtcaaaaagccttcatcttccagcttctcaagatcgcggcgaatggtttcttcggttacctgaaaaatcccactcaaattactgactgtcacctttttatcgttggcaaccatttgcttaattgcctgaatcctgtcttttgccgccacgattacacccctgtatctttttacatcacattagcgcgattatcgcataaccgatgtttactttcaaaataacctgtttgaatcacagattttcatcacagttttcacagaaacagaggtgaatcgtgttgagtatttaacgctccagggcctctgccatttccctcatcaatgttgcgtctgcatcgcttaagttgatattcagtgccgcgacattttcgcgtacctgttccggtgcagtagccccactaagaatggagattaaatcactctgttttaatatccacgccagtgccagagtgggaattgtgcactgataacgagcacaaagtggctgccactgttcaagcatatcaatcactttcagcatgttttcacgctggaaccagactttatttgcccgagcgccgcccggaacgtaatcacgagtgatggtgccggtcaacaatccctgctctagcggggaataaacctgaaccacaatgccattatcacgacatagtggcagcagttcgttttccattgcccggtcgaggatactgtatttcgcctgaataatatccagttcaccatattgcagatactcgcggatatggtcagcatcgacgttagcagcgcctatagcgcgaattttcccttcagactttaactcattaagcactgcgacagtttcagcgatcggcgtaaaaaatggcggcacgctctgccagtgcgtcatgtagatatcgatgtaatcaatacccagacgttgcaagctcgctgctacctcttcgcggatagattccggggaaaggtttttatacaactgccgatcgccaactttgttgaataaacttccttttcgttcccagacaatgccgcatttggtttctactacaacctgttcacggggcagtttttttaacgcctgaccgacgataacttcactattgccaaagttatatcctggcgcagtatcaatcagattaatgccacaacgatgggcttcaagaatcgtatcaatacatatttgccgatcgagatcgccattccatgcaggaccgccgccaatggcccatgtccccaaccccattcggctaagcgtaatatccgttgtgcctaaaggtatctttttcatttgccttcattatccttcgtattcttccagcaattgttcgaccagctttctgttttttacgccggtggtggcaccgacgcttagaacgctgatagccgccgttgcattggcaaagcgtgcgcattcacgcagatttttgccttctaacagtgccgcaataaaaccactagcaaagttatcgcccgcgccaatggtgtcgatggcggttattcctgcgaccgccggcaccttcatcgtcatgtcaccacgcttgataaagcagccgtctttacccgttttaatcaccaccgtttttacgccgcacgcaagaaagcagtcagcaatttcatccagtgtctctttcccggtgagtaattttgcctcggcaaaattaggaaacagataatcgacataactcaatgcttcgcaaatatcatccagcgtttcattcaaccgcggtttgatcatatcggcacagataatcatctgccgggctttagcttgcgtaaaaatttctgttagcgctttaccatccaatagtggactgttgaaaatactggccagacttaataatttcgcctgagaaaaccgcgcaaaatcaacatcgtcaatattcaatttccacagactgccattacggtttgtgacaaacgtccgctcgccatcctccgtcaccagtccaacgttaatagaggtatctatgctgacgtcctgcttcaggctttgaatatcaatattctctttgcggcaatggtcgagaataaattgccctgcggcatctttaccaatacgactcattaatgctgtgcgatggcccagacgagaaataattgttgcttcatttattgcatcacccccggtggtcattgcgattctttcaagaggataagaatccacatcaaagatatttttactgaccggttgcaatggaatatcaacaatagcggcacctatacaaataacgtcgagattatccatatcattattccgctttgccatcagaaccgaacagtttaattttttccaatgcccgttcttttacagctttacgtacttcacgttctaaatgcaggaaaggctgatcctggttttctttcactgcaaccattgcggcctgacagagctccgtatgaatgttgattttcgcgatacccaagctaattgcagttttaatgtcggcatcactgatcccgcttgcaccgtgcaaaaccagcggaacagaaacggcatcgcgtacgcgtttgacgacctcaaagttcaattgtggctcactcgtataaaccccatgctggttgccgatggcgacagccaaactatcacagcccgtacgttcaacaaattcagccgcctggtcaggatcggtatagtgatagcccgccagcgcttcctcataaacggtttcattaccgacatgccctaattccgcctctaccggaatacccagcggatggaagaaatcgacagcctctttggttaaacgaatattttcttcgaaatcaaacgcggaagcatcacgcattaaactattcataccatgagtccaggcgttatgaataatctccatactccgaccatgatcccaatgagttattaccggcaccgttgctttttgtgccatacttaccatcatgtgagagaaatcttcaaaactggtgttaccgacaaaacctgtaccaaaagaaataataaccggggatttcgcttcttcggctgcgtcgataacgcccatcaacatttctgcattccatacgttaaaatgggcaattgcataatgtttatttgtggcatcgttttcccaatatctgatatctgcgagcatgttctgttctcccgtattaattaatcgctaattttaataacgcctttaataatgtcgcgtttgttgttaacactctcttcaaatgcctgttgtacatcccgataatcgtaaatatgcgtcaccatgcttttcacatcgaatcgcccactagaaatagcttcaatcgtgaccggataacgattggcatagcggaataccgtctggatagtgacttcgcgattgattttgaggaaattgattgcgctatcgccgggtacagtaccaacaatcataattttaccgccgcgcattaccagataaggtgcctgtttaacggtgaccgcagaacccgctgtttcgaaaacaatatctgcgcccatgtcttcggtaaattgctgacagcgtgcaatagtgtcttcttttgcgccgttaataaccactgtcgcaccaagctgttccgccattgccagacgtttttccagcacatcaacgacggcaatttccgttgctcccaggcatttgcacgcttgcaacgtcatcaaaccaatacaacctgctcccagaataattatcttcttacccggtttaacatctgccagcatcgcggcatgcatcccgactgcggcaggctccaccagcgccccttccatcgtgtccatattgtcgggcagtttgtaagtaaagctctccggatgacacagatagtgcgttaatgcgccgcggtagttgggttgtgtcgccataaaatcaacgtccgggcagatgttatatttgccttccagacagtaacgacagtgaccgcaaggaacgccaggttcgatatttacccgatcccccggtttaaatttgcgcacgcggcttcccacagccacaaccgtcccggcgcattcatgacccaggccaatttcttgatttgggtctttaggcggaataaacgggccactttcaaaaccatgtacatcactaccacaaataccgacatattctactttaatcaaaacttcatcttctttaggcactggtatttctgcactaataattttcattgtgcccggcacctgcaatattgctttactatttttcattttgaatccacccgtattatttattggctactgcatcaatacttaaactttcaacggagacacctttggtttcgattccaatggtggcgatagcaattgcgacaataatactaaccgcccccagaagaataaagactcccgtaacgccataactactgagcagcactgcaacggcataaggtgcggcaataccactgattcgccctaccgcattcgccagaccggagccacggagtttggcctctgtcggccagatttcagggacatacactgcgctggcatagcaagcgtacatatagacgaaagtaatcaggaagaaaccaatcaacgttatgagcaacatactggtttgcagactatagatatatccgagcaccgcaatcaggattaatagccccacacccattgttttacgcggaattttatccatcaccagcatggcaataaaaataccaaatggcgcgccaaacatactcatggtatttaaaacaatgctgtcttttaaattaatcccctgggtcatgaatattgttggcaaccagttaattagtgtgtactgcacaacgttcatggcaatcagcacacaagagcctaatatcacgcgtttcagtaatactcctgtcagtaaggcactatacggcaccgcttgtggcgctttaccgtcatcagcaataaccacaggcggcaaaggtttacccgtctggcgtatgacgccttcttctatactccgcatgactttctcggcttcctgataccgtccgcggctttccagccagcgcggggattcaggaaagtagcgccaggccagcgccgtagcgataaggctcaatattgcagggataagcagttgtacccgccagttccactctgcactaatcagcggcgtgagtcccatcgctatcaaactacagagcggataactccagttgccaataaaggaaacccgactactccacgttccacgatttctaccgggcatatattcggtgaaaccagcaaacagcgtaaccagtaaagctcccagcccaactcccatcacaaaacggcaggcaataaggaaatccatattcggactgaaagcaccgacaaccatgctggcaatatgaatggcctcatagaggatgaacgcatttctgcgaccggttttgtcgccaatgatgccgcccaccagcgcaccgagaaacattccggcggtcgtgattgcactgaatgtggctgtggtggaattatctgtccagcccaacgctttcagctgcgcgaggatcaagccaccaacggcattactccagcagacaagcaagccaaacgcgacgatggcaaacatactactatgccagcggcaatccggtaagcgatccagccgtgcaccacaatgcggttttgttatctgttccatgcgataacgttccttcaggagagtggttattcatcaaagtcgtaagtcatgatcactttgattgcggttttatcgaccatcgcatcaaacccttcgcgccattggctcaggccgatacgatgcgtgatcatcggtttgactttgatagcgccgctggctaatagcctgatagcgttacgccaactggtggagtcataggccatatgcccaatgatgcttttgttccaggcggtaatgtcattaatgctgaaatcaagaggtttgaagcccattccaacgcgtaccacttccccgttcgggcggagcatttcgatggcttgtttcagtgcgatattggcaccggagcattcaatcaccagtcccagattgtctttgccacaaatttgctggcagcgcgccaccacatcttcggtagaaccatttactactgccgtcgcacccagttcttttgcaaccgggaagcggaccgccacatcttcttgcagaccaacgacgacgatatttaccgcccccataattcgcgccatttgtacggagaacagcccgagtgggccagtgccgatgacgaccacatcctgaccaggaaggaatttgctttgctgcgcgatggatttgtaggcattacagatagggtcaagtacggctgcgtcctcataatcaacaccatcagggatttcccacaacgcatgacgatgaattttgagaatttcaccaggaaccagacaatatttggaaaaaccaccgccccaggtattattatccagaccaaggtttactttttctgtacaacacagaaaatcaccttgttcacaggccggacaaacaccgcaaacgtgaccgctgttatcgcttacgacgcgttgccccactttccagtctttgactttttcaccaacctgcgcaatacaacctgcgaactcatggccgcggatagagttaaactcatcagaaccgctatcgacattgtagtgcttcatgtctgcgccgcagattgccgcggctttaatttcaatcactacatcttccgggccacacatgggttgtgggacatcaatcatcttgtagccgccaaaggccttgccaaaccgagccagtgctttcattgcgtcatcctctgtgtttagttttgcttagatggccatcatacttacccacatgatttttgaggtcaacattaaatctgtaaaacacagataatgatctgcgttttacaactcagatcacaattacgcagaaaatggctgggtctgttacaggttgatggaaggcggggcgcaaaaagagcaaattcgagagggattaccggccaaataggtctgagacttaagttcaggagaagtcattcaggtgtgaacgggacggcaagagatcggactgggacttagccaggtcatggcgagataattgagatgagtcgtggggtcattgttggctatccccttcatagccgaggcaaaaaggggatgaaccacttacttaaacatggcaataggctttgcactgataccaaaatcttcttttaactgctgtttgctcttcatgaccatctgaccatttgtgtcaattgtcatatgctgtgcttcgatattatggcgggcttgccacagcatcaccagttgcaggcagttctctttttgttcctcggtcaacgcaacgccatcaggccatttccccagttcaacggcggtgctcaaacgctggtatacctcaggcatcatgctgttgataatgtcatcaagattcataatttttccgctcctgtggaataagttgctgaatcgttttttcaaccgttgatttcttcgccgttttcgccatcggtaaagcgtaaagaggcagagttaacacaataacgttcgcccgttggctgcggcccgtcggggaagacatgccccagatgggcatcacagttaccgcaacgaatttctatgcgctgcattccatgactcaagtctttgatataacgaatggattcttcacttaccggttcgtagaaactgggccagccacagccggaatcatacttggtttgggaatgaaacagcggggcatcgcagatcaaacagtgatatacgccgtcacgcttgttatgcagtaaacgacccgtaaatggcggctctgtcccatgattctgcgtcacgtaaaactgcatctcggacaaattttttttcagttcttctgcgctaggtttattagccatttgctcacatctcactttaatcgtgctcacattacgtgactgattctaacaaaacattaacaccaactggcaaaattttgtcctaaacttgatctcgacgaaatggctgcacctaaatcgtgatgaaaatcacatttttatcgtaattgccctttaaaattcggggcgccgaccccatgtggtctcaagcccaaaggaagagtgaggcgagtcagtcgcgtaatgcttaggcacaggattgatttgtcgcaatgattgacacgattccgcttgacgctgcgtaaggtttttgtaattttacaggcaaccttttattcactaacaaatagctggtggaatatatgactatcaaagtaggtatcaacggttttggccgtatcggtcgcattgttttccgtgctgctcagaaacgttctgacatcgagatcgttgcaatcaacgacctgttagacgctgattacatggcatacatgctgaaatatgactccactcacggccgtttcgacggtaccgttgaagtgaaagacggtcatctgatcgttaacggtaaaaaaatccgtgttaccgctgaacgtgatccggctaacctgaaatgggacgaagttggtgttgacgttgtcgctgaagcaactggtctgttcctgactgacgaaactgctcgtaaacacatcaccgctggtgcgaagaaagtggttatgactggtccgtctaaagacaacactccgatgttcgttaaaggcgctaacttcgacaaatatgctggccaggacatcgtttccaacgcttcctgcaccaccaactgcctggctccgctggctaaagttatcaacgataacttcggcatcatcgaaggtctgatgaccaccgttcacgctactaccgctactcagaaaaccgttgatggcccgtctcacaaagactggcgcggcggccgcggcgcttcccagaacatcatcccgtcctctaccggtgctgctaaagctgtaggtaaagtactgccagaactgaatggcaaactgactggtatggcgttccgcgttccgaccccgaacgtatctgtagttgacctgaccgttcgtctggaaaaagctgcaacttacgagcagatcaaagctgccgttaaagctgctgctgaaggcgaaatgaaaggcgttctgggctacaccgaagatgacgtagtatctaccgatttcaacggcgaagtttgcacttccgtgttcgatgctaaagctggtatcgctctgaacgacaacttcgtgaaactggtatcctggtacgacaacgaaaccggttactccaacaaagttctggacctgatcgctcacatctccaaataagttgagatgacactgtgatctaaaaagagcgacttcggtcgctcttttttttacctgataaaatgaagttaaaggactgcgtcatgattaagaaaatttttgcccttccggtcatcgaacaaatctcccctgtcctctcccgtcgtaaactggatgaactggacctcattgtggtcgatcatccccaggtaaaagcctcttttgcattacagggcgcacaccttctcagctggaaacctgcgggtgaagaagaagttctgtggttgagcaacaacacaccgttcaaaaatggcgtcgctattcgcggtggcgtaccggtttgctggccgtggtttggtccggcggcacaacaaggtctgcctgcgcacggttttgcccgcaacctgccgtggacgctgaaaagtcatcatgaagatgctgatggcgtagcgctgacttttgaattgacgcaaagcgaagagacgaaaaaattctggccgcacgactttacgctgttagcgcatttccgcgtgggtaaaacttgtgaaatcgatcttgaaagtcatggcgaatttgaaaccacctctgccctgcatacctactttaacgtgggtgatatcgctaaggtaagcgtcagtgggctgggcgatcgcttcattgataaagtgaatgacgcgaaagaaaatgtactgaccgatggtattcagaccttccctgaccgtaccgatcgcgtgtatctgaatccacaagattgcagcgtgattaatgatgaagcgctgaatcgtattatcgccgtaggccaccagcatcatctgaacgttgtcggctggaacccgggaccggcgcttagtattagcatgggcgatatgccggatgatggctacaaaacatttgtttgtgtagaaacggcttacgctagtgaaacgcaaaaagtgaccaaagagaaacctgcacatctggcgcaatccattcgcgttgcgaaacgttaatttacgttaatgttgtgtgccgggtgcaatgcatccggcacacaacatcacaccatatccagcgcagtttttccttttggtgccggatatgccttatccagcatagctaattccgcactagaaagttcgacctcaagcacagccgcattttgttggacatgggcaatcgtggccgcttttggaatcgccatcacaccctgatgactgatcacccacgccaacaatacttgtgccgcgctgatattgtgagcatgtgcaatttcgttgactaccgcgttttttaacagtccattgcgcaaccgcccggcctgggctaacggactgtaagccatcaccggcatctgctgttgctggcaccaggggagtagatcgtactcaattcctcgactaccgagatggtaaagcacctgattagtggcacactgatttccccccggcagctgccagagttcctgcatatcagcataatcaaggttagaaacgccccagcggcggatttttccctgggcgatcaatttttccatcgctgcgacagtctcttcaaaagcgaaactgccagaccagtgtaataagtaaagatcgagataatcagtattgagacggcgtaaactggcttcgcatgcatttatcgctttttgcccgccagcattccacggatagactttagagacgagaaagaccttctctcgcagaccggttaatgcttccccaaccaccttttcggcaccgccatcggcatacatttcggcggtatcaatgagggttaaaccgagttcaatgcccgcgcgtagtgcagcaacttctgttttgcgctgactggcatcttcgcccatataccatgttccctgccctacggctggcagactgacatcgccactaaattgaatcattttttgttgcattgtttcctcccaggtattgcaccaccgtaatgcaaaacagggcgtgacgccctgtttttatgcacaaaatgccctggaaagatgcattatcagaatttgtaggtgatcccggtagaaatcaggccagtccaggatttatccaccatcgggctgtcagtaacttcatcagacagacgggtgtagcgtgcggtaccgtaaacactccagtcgccgaggaagttgtagctggcgctcagctccaggtaagggctccagctgtcgttcgggttatagccacgcagaccgctgcgagcggactctttgcggcttacgccataatagtattcgttctggttttcgctgttccactgcacaccaatacccggagtcacggtcaggccaccgttggtgtaacgatacaaccaggccatatcccagacgatgccgttgctgttatccagggtatcgccagccagggtggtacgcaggtaaccgtactgggtaaagtgagcataagacagaccagccatcatggtgctcttacggtcatccaggtgacgcatttggtgatcgccactgtctttcgctttgaagtaaagcgggctccagtaagcggtaatactaagtttatccgttgcgtcattccacaggtagtaaccaccacctaagccacggaaccagaagttatcgccttcatagttgattaccggtactgggtaaacatcggtatcgtaatctttatatgggtgttcaacgacacctacgcctgcgcccagggaaaatttaccttcagcgtgcgctacgcctgcagacgttgcgataagcactccaagtgccagaagtttgagtttggtcacaattaatcattccttaaacaaatgtttagcgggcgacaaagtttacccgtcaatacatcgaaacccaacctttttacgttttcattttttaaagtaactgtttaattttcctgacgcggatgacaccgcgcttacagccaaatgaatttagcgttactggcgagcctggtctttacattaattatgcaaaatttatggatgagttgttgatatgccattgaaattaagaaagccgtgcaggcaagttttccatttgccatctacgcttaattttgaaggtgtatcaccgggcacgttgttctcatcgtcgataaaatggcatgagagttgctgtgttttagcaagagacgtcgttcagtttacctcttccgggagcctctactattcatatgaacggctcttaacctgtgctaaaaaacgaaaggacggcataccatgaatatattcgatcactatcgccagcgatatgaagctgccaaggacgaagagttcacactgcaggagtttcttaccacttgtcggcaagatcgcagtgcttatgccaacgcggctgagcggctattgatggctatcggtgagcctgtcatggtcgatacagcccaggaacccagactttctcgactcttttctaaccgggtcattgcacgttatccggcgtttgaagagttttacggcatggaagacgcgattgaacagattgtctcttatctgaaacacgcggctcaggggctggaagagaagaaacaaatcctgtatctgctggggcctgtgggtgggggtaaaagtagccttgctgagcgactgaaaagtttaatgcagctcgtaccgatttatgtattgagcgcgaacggtgagcgtagcccggtcaacgatcatccgttctgtcttttcaatccgcaggaagatgcgcagattctggaaaaagagtatggcattcctcgccgttatctcggcaccatcatgagcccgtgggcggcaaaacgcctgcatgaatttggtggcgatatcactaagttccgggtagtgaaggtctggccgagtattctgcaacaaattgctatcgccaaaacggaacccggcgatgagaacaaccaggacatctccgcgctggttgggaaagtcgatattcgtaaactcgaacactacgcgcagaatgacccggacgcctacggctattccggtgcgctgtgccgcgccaatcaggggatcatggaattcgttgagatgtttaaagcaccgattaaagtgctgcatcccttgttaaccgccactcaggaaggtaactacaacgggacggaaggtatctccgccctgccgttcaacgggattattctcgcacacagcaacgagtccgaatgggtcactttccgtaataacaaaaacaacgaagccttcctcgatcgtgtttacatcgtgaaggtgccgtattgcttgcgcatttccgaagagatcaaaatctacgagaaattgcttaatcacagtgaattgactcacgccccatgcgcccctggcacgctcgaaacactgagtcgtttttccattcttagccgcctgaaagagccagaaaactccagcatttatagtaagatgcgggtttatgatggcgaaagtctgaaagacaccgatcccaaagccaagagctatcaggaatatcgtgactacgccggtgtcgatgaagggatgaacggtctgagcacgcgttttgcgtttaagatcctctcccgcgtgttcaacttcgatcatgtagaagtggcagcaaacccggtccatctgttctacgtcctggaacagcagattgagcgcgagcagttcccacaagagcaggcagaacgctatctggagttcctgaaaggttatctgatcccgaaatatgccgagtttatcggcaaagagatccagacggcctaccttgaatcctattccgaatatgggcaaaacattttcgaccgttatgttacctacgcggatttctggattcaggatcaggagtatcgcgatccggataccgggcagctgtttgaccgcgagtctcttaacgccgagctggagaaaatcgagaaaccggcggggatcagtaatccaaaagatttccgcaacgagattgttaacttcgtactgcgcgccagagcgaataacagcggacgcaatccgaactggaccagctatgaaaaactgcgcacggtcatcgagaagaaaatgttctccaataccgaggagctgttgccggttatcagctttaacgccaaaacgagtaccgacgagcagaagaaacacgacgactttgtcgaccgtatgatggaaaaaggctacacccgtaaacaggtgcgtttactgtgcgaatggtatttgcgcgtacgtaaaagctcttaacaaccctggcccggtacacatgttaccgggcctacaacgacagcgaaccgtgggcctgagaagcggcaacacaggcgtagcatacagttggcaaatgtagtacggggggcatatgacctggtttattgaccggcgtctgaacggcaaaaacaaaagcatggtgaatcgccagcgttttttacgccgttataaagcgcaaattaaacagagcatctccgaggccattaataagcgtagcgtgactgacgtcgacagcggcgaatccgtatccattcccacggaagatattagcgaaccgatgtttcatcaggggcgtggcggtctgcgccaccgcgtgcatccgggcaatgaccatttcgtccagaacgaccgaattgaacgtccccagggtggcggcggaggttccggcagtggtcagggccaggccagccaggatggtaaaggtcaggatgaatttgtctttcagattagcaaagatgagtatcttgatctgctctttgaagatttggccttaccgaatctgaaacaaaaccaacaacgccagctgaccgaatataaaacgcatcgggcgggttataccgctaacggcgttccggccaatatcagcgttgtgcgtagtttgcagaacagtctggcgcgacgcacagccatgacggcaggcaagcggcgggaacttcatgcactggaagagaatttggccatcatcagcaacagtgaacctgcgcaactgctggaagaggaacgtctgcgcaaagaaattgcagaattacgtgccaaaattgaacgcgtcccttttattgacaccttcgatttacgttacaagaactacgagaagcggcccgatccctccagccaggcagtgatgttttgcctgatggacgtttccggtagtatggatcaatccactaaagatatggctaagcgtttttatattctgctgtatctgttcctcagcagaacgtataagaacgtggaagtcgtatacatccgccatcatacccaggcgaaagaagtcgatgaacatgagtttttctacagccaggaaacaggcggcaccattgtttccagcgccctgaaactgatggatgaggtagtgaaagagcgttataacccggcacagtggaatatttacgctgcacaagcaagcgacggcgataactgggccgatgactctccgctttgccatgaaatcctggcgaaaaaattattacctgttgttcgttattacagctatatcgaaattacccgtcgtgcacatcagacattgtggcgagaatatgagcatctgcaatctactttcgacaactttgcgatgcagcacatccgcgaccaggatgatatttatccggtgttccgtgaactgtttcataaacaaaatgcaacagctaaaggctaaaactatcagccaggtcattatcgcctggctgatttttagcttactgtaaattatctcatttattacatacattagcttacaatcgctttaaatatgacagcataacctttacataatttagttccagaaaacaatcattcggaaaaatgattcagagtacacgtatttccatggggttattctttaaatattttttaagcttaacgaaaattgatcctggtcaaaactatatatctctgccaagtataaaatccagcactcacattgctctcctttttatggtttctatgggtacacaaaaattaaaagctcaaagcttttttattttcagtttattgctgacgttaattttattttgcattactaccttatataacgaaaacacaaatgtaaaactcatcccacagatgaattacctgatggttgttgtggctttgtttttccttaacgccgtcatttttcttttcatgttaatgaaatatttcactaacaaacaaattttaccaacactcattttaagccttgcatttttaagtggccttatctatttagttgaaaccattgtaattatccataaaccaattaacggcagtacactgatccagacaaagagcaatgatgtttctattttctatattttccgccaactcagttttatttgtttaaccagcctggcgctcttttgttatggaaaagacaacatccttgacaacaataagaaaaaaacgggaatcctgttgctggcgctgatcccttttttagtttttccccttctggcacacaatctgagcagttataacgctgactattctttgtatgtcgtcgattactgtccggacaaccatactgcgacctggggaatcaactatacaaaaatattggtttgtctgtgggcatttttactgttctttattatcatgcgcacacgattagccagcgaactatggccgttaatagcattattatgtctggcaagcctatgctgcaacttacttctactgactctggatgagtataattatactatctggtatatcagtcgcgggattgaagtttccagtaaactgtttgttgtgtcttttctgatttataacattttcaggagctgcaactctccagcaaactggcagttcatgatgtgctgaccaatatttataatcggcgctactttttcaacagcgtagagagtttattgagccgacctgttgttaaggacttctgtgtcatgctggttgatattaatcagttcaaacgcatcaatgcccaatggggacatcgtgtgggtgataaagtgctggttagtattgtcgatattatccagcaaagcatccgccccgatgatattttagcgcgactggagggtgaggtgtttggcttgctatttaccgaactcaatagtgcccaggcaaaaatcattgcggaacgtatgcgtaaaaatgtcgaactcctgaccggctttagtaacagatatgatgttcctgaacaaatgaccatcagtattggcacggtttttagtacgggtgacacgcgtaatatcagccttgtcatgacggaagcagataaagccttacgcgaagcgaaaagcgaggggggcaacaaagtgattattcatcatatttaagtgcaaaaatattcagagccatgctttttgcgtggcttttgcatacaatttattactattacccctaaatttcccctccccagcggcgcagagatgagtataattagcgcccctgtgccaggccgcaatcgaactttatctggttttctcgtttcactaaccgaaggagatgcgtataaagcttccgatgagcgtttatatgtcaataagcagaacaaaaacagccgttcatgataaccttctgtggttgtttgcttgtaatctcaggagcgtgaaatgactgaaatggctaaaggaagcgtgacgcatcagcggttaatcgctttattaagtcaagaaggtgctgacttccgcgtcgttacccatgaagcggtaggtaaatgtgaagcggtgagtgaaattcgtggcaccgctctaggccagggtgctaaggcactggtatgtaaagtcaaaggcaatggcgtaaatcaacatgttctggcgatcctcgcagccgatcaacaggccgatctgagccaactcgccagccatataggcggattacgcgctagcttggccagcccggcggaagtcgatgaactcacaggctgtgtcttcggcgcgatcccccctttcagcttccatccaaaactcaaactggttgccgaccctctactcttcgaacgatttgatgaaatcgccttcaatgcaggcatgctggataaatccgttattttgaaaaccgcggattatttgcgcattgcgcaaccagaactggtcaatttccgccgcactgcgtaattagccggtccgttcgataagaagaacggacaaaaccagtacaacagcaatggcaaaaaagctactcgtgataatcagtgtctcgacaaacatttgatcgttcatagcatgcccccgggagatagctgttttcacgttattgttagcgtgcacaaatggcagtttgatgacagttcgcctgattttttatgcaaaaaacgtaaagattttctacttccttcctgcagcaagcgtaaagtaagcaggcttattattttttggcaaggaaaccacgatgtttgatgtcactttgctgatcctgctcgggttagctgcgctgggctttatcagtcataacaccactgtcgccgttagtattctggtgttaatcattgtccgcgtcacaccgttaagcaccttttttccgtggattgaaaaacaggggctaagtatcgggataatcattctgacgattggcgttatggcccccatcgccagcgggacgctaccgcccagtaccttgattcacagctttctgaactggaaaagtctggtggcgattgcagtaggcgtgattgtctcctggctgggtgggcgcggcgtgacgttaatgggcagccagccgcaactggtcgccgggctgctggtaggcactgttttaggcgtagcgctgtttcgcggcgtaccggttgggccgcttattgccgcgggtctggttagcctgattgtggggaaacagtaattattgccgcgggtctggtttcgcactttgtggggaaacagtagttaatctcgcaatatatcggcctggcgtttgccccaggcctttcttaaacatagtaataaaggccgttgtactatcataccccagcgtatgagcaactttctgtacagtatcgcctttcactaatccctgaagcgccataatcagctgtaactgctgacgccactggcgaaaactcaaccccgtctcttttactatcagtcgggcaagattgcgttcactcatcgcaaaaaagccagcccattgccccaatgccccccactcgacaggccctttcgccatcatctccaccatcgtgcggattttaggatgagaagaaacgggcaggtgcagctgttgttgtggctgctgagggagttcatcaaacaggacctgaattaatctgcgggtcattggctcagcacgctgagtcgtcgtcctgtttgccagggttaaaattaattcccggcataaggggcttattttcaatgtgcaacatgttgtcggcattgtcactgcgctgggttcgataaacagaaaacagagttcagcattagctgttacttgattgctatgttccaccccgcccggtatccaaaccgcatattgtggcggcaccatccacaaagcattttccaccgtacaggtaattgcaccatgtagcgccagtatcagctgtcctttgcggtgctgatgtacaggactggttaactcatccgttccggcgtgaatacaaaatgcgaccgcggcttcatggtgtcggtcgggttcatagccattgagattcaacctgtgcatcattttgtccgaacttagcgataatttgtcattttagcttgattcaacataacaataaaaacggtaaggtacagcctcgtttgtaacaatgagaagcatatgacctgtagtactagtttaagcggcaaaaacaggattgtccttatcgctggcattctgatgattgccacaacattacgcgtcacctttaccggcgcagcaccgttactggatacgattcgttccgcttacagcctgacgacagcgcaaaccggcttattgaccaccctgccattattggcctttgcgctaatcagtcctttggctgccccggtagcgcgacgttttggtatggaacgtagcctgtttgccgcgttacttttgatctgtgctggtatcgcaattcgctctctccctagcccttacttattatttggcggtacagcggtcattggcggtgggattgcattaggcaatgtcttactgccaggattaattaaacgcgatttccctcattccgtcgccagacttaccggcgcatattccctgacaatgggagctgcagcggcactgggaagcgctatggtcgtgccgctggctttgaacggttttggctggcaaggcgcgttgctcatgctgatgtgttttcctctgctggctctttttttatggctgccacagtggcgaagtcaacaacatgcaaatttgagtaccagccgcgccttacatactcggggtatctggcgtagtccgcttgcctggcaggtcacattgtttcttgggatcaacagtctggtctattacgtgattattggctggcttccggcgatcctcatcagtcacggctatagcgaagcacaggcgggtagtctgcatggtttgctgcaactagccacagcagcacccggtttgctgatcccacttttcttacatcatgtgaaagatcagcgtggtattgcagcgttcgttgccttgatgtgcgcagtgggcgcggttgggctctgctttatgccagcgcacgcgatcacctggactctgcttttcggttttggttccggcgcaacaatgatactggggttgacgttcattggtctgcgggctagttctgcgcatcaggcggcggcactcagcgggatggcacaatccgtcgggtatttgttggcagcctgtgggccgccgctgatgggtaaaatacacgatgctaacggtaactggtctgtaccacttatgggtgttgccatacttagtctactgatggcgattttcggactttgcgccgggagagacaaagaaattcgctaatatccggtgctatagtgacgtaacaaatcatgcgtgaaagggagaacaaacacgatgaatattcagtgcaaacgcgtttatgatccggctgaacagagcgatggttatcgcatactggtcgaccgcctctggccgcgcggtatcaaaaaaaccgatttagcccttgatgagtgggataaagaaatcacgccgagtacggaactgcgcaaagcctttcacggcgaagtcgtcgattatgcaacctttcgcgagcaatatcttgcagaactggcgcaacacgagcaagaaggaaagcggctggcggacatcgccaaaaaacagccgctgaccctgctctacagtgcaaaaaacaccacgcagaaccatgcgctggtgctggccgactggctacgtagcttgtgattttagtacagcatccggcggttatttttcaccagccggatggtcacgccgccacaatgcccattcatcaatcgtttcaccgcccggtaatttgcaattgttgctgaccccttgcgctgtctgcactggaatgagcgtcccgcccttctgctggcaatagacgctcgccggatttgccataccaatctgcggcggtttaggtgcttctggctgagaaggggtactacaaccagccaggaccagcaagcaaggcagaacaaaactgataattttcatttattgatctcacatatttatccaagattagagtatcgcggtatcgttttgttttgcagcactatttttattacattcactcaaaacatattacgtcttgtttcatctttgttgatgatgttttatcatgcctgcaaagattaaataatcagcatttacccgccgtatcctggagttgttccgtgagtgatcagattatcgcccgcgtcagccaatcccttgccaaagaacagagtctggaaagtctggtccgacagcttctggagatgctggaaatggtcactgatatggaaagtacctacctgaccaaagtggatgtcgaagcgcgcctgcagcatattatgtttgcccgtaacagccagaaaatgtacatcccggagaattttaccgtcagctgggattacagcttatgcaaacgcgccattgatgaaaactgctttttcagcgatgaagtccccgaccgttggggtgactgtattgcggcacgcaatcttggcatcaccacatttctgagcacgccaattcacttaccggatggaagtttctatggcacgctttgcgccgccagcagtgagaagcgccagtggagtgaacgcgcggaacaggttttacagttattcgccggactgattgcacaatatattcaaaaagaggcactggttgaacagctgcgcgaagccaatgctgcgctgattgcgcaaagctataccgacagcttaaccgggctaccgaatcggcgggcgatttttgaaaatctgacgacactgttttccctcgcccggcatcttaaccataagataatgatcgcgtttatcgatctggataacttcaaattaatcaatgatcgttttggtcataatagtggcgatctgtttctcattcaggttggcgagcgccttaatacgctccagcaaaatggcgaagttattggtcgtctcggcggtgatgagtttttagttgttagtctaaacaacgagaatgcggatattagcagcctgcgagaacgcattcagcagcaaatacgtggagaatatcacttaggtgatgttgatttgtattatcccggtgccagtcttggcatagtagaagtcgatcctgaaacaaccgatgcagacagtgccctgcatgctgccgatattgcgatgtatcaggagaaaaaacacaaacagaaaacaccttttgtcgcgcatccagcgctacattcctgaggcgtattcacatccttttgattggtgataacatgcgaatcggtattatttttccggttgtaatcttcattacagcggtcgtatttttagcatggttttttattggcggctatgctgccccgggagcataaagatgaaaaaaacaacgattattatgatgggtgtggcgattattgtcgtactcggcactgagctgggatggtggtaacgtcacctctaaaaaatagcaaaggctgcctgtgtgcagcctttgtgcaatttaagcgttaacttttaatcttcctgtagataaatagcacgacaatcgcaccaataacggcaaccacgaagctgccaaaattgaagccatcgactttaccaaagccaaacagcgtgctgatccatccgccgactacggcaccgactatccccagcaggatagtcataaagaatccacctccatctttacctggcatgatccacttcgccagaataccggcaataagcccaaaaataatccaactcagaatgcccattgtttcctcacttatctgttttgcattagcgggttagtcgctgataaaaagcatagcacaacatcgggagggcaagatttgtgacgagcatcacggaggttttttttgcgatggcgcagaaattgcgccatcaacgatcagtgataattaccaaccacaaacatcatgttcgttttccgtgtcataagaacgtacggtattcaccagatcttttatcacttcagccgccacttctggcaccagcaaagtcatcggcgtctctgtttcataatcgacagaaacgccattgctgttattggtgacggtcacggtatacgttgctttgcccatgattcatttcccgttatgaatgactttccgttgttgcgcaccttccatcaggacttcaggagccacgaagaagtcaatgttgaaataagtatcgtcagtcatggcttcaatgttgtgccacttttctggagggaacaccgcaaactgccccgcttcgataaggatcacctgatcaggctctgcactgtgttcatcagcgtagccgagatatttgaccgccccatgcataacggaaaggcgtgggtaaacccccgggcgcgttcctttatcaagatgacgttcgaatattccggcaggtgcagtttgtttattccagaaaggcgtactgcgcgtatgaatataattctgtgggatttgaagcatccttttccctccttcggtgaatgcgctgaaaacggtttattccagccgtttcagggtacgcctgataatttgcattttaaataccatttattggttactttttagcaccatatcagcgaagaatcagggaggattatagatgggaagcccgcgacaacgcgggctgaaagcatcaggattgcagcgtcgccagtcgggcagcgaaacccacgaacatcaaaccaatcagactgttgccaactttagccagtttctttttggtacgtatgtactgcgtgacaaaagcaccagatataatcaggaagctcaaatagcagaaactcaccagttccagcgtcgccgccagaataaagaaactaattcccgtatgtggggcattaacatcgataaactgtacgaaaaagctcacatagaacaaaatggctttcggattagtcaggctcaaaattaacgcgcgtttaaaaatagcaccgtattggggctcatcggatttggcctcgctatttttacccttcagggtcgcgtaaagaattttactccccagatagagcaaataaaacgcaccaagataacgtacaatgttgaataatatcggggtggtcttaattaatgtcgccactccagcccatgccagaaacatcaataccgcatcgccaataaatacaccgcaggccgcaagataaccgcctttcataccgctactgacgctatttttgagtacaaacagggtatttggccctggcaccaacacaataaaaatggccccaaccagataggtccagtaattcagaaccccgtattcagcgaacacattaacctctttaattatctttcgatcatgcgcgattaaaggtgaatatgctaaccaatctgtagcggcttagaaaggagaaaatcaggttttaacctgatatcaacccgataattgaatcattaatcaggcatgctccagactaaaattcgggtagtgctcggcaaaatactggcgtaaaaattctaccgttatccgcactttcgcactcgtcgccagcctactaacataaacggcccagacgttcgctggctggtaatattccggtagcacttgcactaaatgaccactggcaatgttttcgctaacatcccaccaggaacgcagagcaatcccctgcccatcgagacaccactgatggacaatttctccatgattagagctcagtgggccggtgactttaatcgcatgggggccttctttattgcgtaattgccagacaccaaaaggatgatcgcgctctttaatgaccaggcacggcaatgcagaaagatcggttaaatgtttcggcgcgccatgttgcgcaataaattccgggctcgcgcagagaatacggtaattggtcgccagtttgcgggcgattaaattaggggcgatgtcatcgccaatgcgaatatcgagatcgacaccttcattgaccaaatcgaccagtcggtcttccacatcaaaacgtaattccagttgcggatacgccttcgccagcgctaataacgccggagccaccacctgtcgtccaaaaccaaagctgctgataatacgcagcatcccctgcggcacctgacgcacgtcagaaagttcgtccatcatctgaccgacatcctgcaaaatccgctgcgcccattcataaatccgctctccttcttcggtaatggtgacgcggcgggtggtgcggtgtaacaacaccacgtttagcgtttgctccagcaaggcgatgcgcttgctgacgaacgccggactaacgcccagttcttccgccacggcggcaaaaccagcccggcgagccaccagcataaagacgcgcaaatcattcagcagcggtaaattattcatgattcgtgttttatgtttcaccagttacggggattaattccttttcagtcaattataggatggtgatgttgtcaattttgatggtcaggaagtgagaacccaatgatgaaaacgatgcgtattgctgcgatcccgggagacgggattggcaaagaagtccttcctgaagggattcgcgtgttacaggctgccgctgagcgctggggcttcgccttgagttttgagcaaatggagtgggcgagctgcgagtattacagccatcacggtaaaatgatgccggacgactggcatgagcaacttagccgtttcgacgccatctattttggtgccgtcggctggccggataccgttccggaccatattagcttgtggggtagcctgctgaaatttcgtcgtgaattcgaccagtacgtcaacctgcgcccggttcgtctctttcctggcgttccctgcccgctggcgggaaaacagcctggcgacatcgatttttacgtggtcagggaaaacaccgaaggcgaatattccagcctcggcggtagagtgaatgaaggtacagagcatgaagtcgtcattcaggaaagcgtatttacccgccgtggtgtcgatcgcattttgcgttatgccttcgaacttgcgcaaagccgtccacgtaagacactaacttctgccactaaaagcaacggtttagccatcagcatgccgtactgggatgagcgagtggaagcaatggccgagaattacccggagatccgctgggacaagcagcatattgatattctctgcgcgcgttttgtgatgcagccggaacgattcgatgtggtggtggcgtccaatttgtttggcgatatcctttccgatcttggcccggcctgcaccggcaccattggcattgccccatccgccaacctgaatccggaacgcactttcccgagcctcttcgagcctgtccacggttccgcgccggatatctacgggaaaaatattgctaaccctatcgccacgatttgggccggggcaatgatgctcgattttctcggcaatggcgatgagcgtttccagcaagcgcataacggtattctggcagcaattgaagaagtgattgctcacgggccgaaaacacctgatatgaaaggcaatgccaccacgccacaggttgccgacgcgatttgcaaaattattttgcgttaaggtcaaaccagtttatttgaaccgcgtcactgacgcggtttttttattcgttctttgcagtaaataacctgcgtcatttcaccttttattgtttccgtttcgtgttttatggctttccgtattcttaattgtttaatttatgtaacatgcaaattttgttacgcgtacgttaggttccgccgtacaggtattggttttgctggcaatgggactggtgatttatttagccaccagtaaatacggcaatattcgtcttggcgaaggaaaaccggaatacagcacgctctcctggctgtttatgtttatttgtgccggtttaggttcttctacgctttattggggggttgctgaatgggcctattattatcaaacacctggattaaatatcgcaccgcgtagtcaacaggcactcgaatttagcgttccctactctttcttccactggggcatcagcgcctgggcaacttatacgctggccagtttaatcatggcttatcactttcatgtgcggaaaaacaaaggtctgagcctttccggcattattgctgctattaccggcgttcgcccgcaaggcccatggggaaaactggtcgatttgatgttcctgatcgccactgtcggcgcactgaccatttcccttgttgttaccgcagcaacctttacccgtgggctttccgcgctgaccggtttacccgataacttcaccgtgcaggcatttgtgatcctgctttccggcggcattttttgcctaagcagctggattggtatcaacaacggtttgcaacgtctgagcaaaatggttggctggggcgcgttcctgctgccattactggtgctgattgtcggcccaaccgaatttattaccaacagcatcatcaatgccatcggcctgaccacgcaaaacttcctgcaaatgagcttattcaccgatccgcttggcgatggtagttttacccgcaactggaccgttttctactggctgtggtggatcagttacacccctggcgtagcaatgtttgtcacccgcgtttcccgcggtcgtaagattaaagaagttatctggggactgatcctcggcagcaccgtcggttgctggttcttctttggcgtaatggaaagctatgccattcatcagtttatcaatggcgtaatcaacgtcccacaggtgctggaaacactgggcggcgaaacagctgtacagcaagttctgatgagcttgccagccggtaaattgttcctcgccgcatacctgggcgtgatgattattttccttgccagccatatggatgcagtggcctacaccatggcggcgaccagtacgcgtaatctccaggaaggtgacgatcctgaccgtgggctgcgtcttttctggtgcgtggtgatcactctgatcccgctttccatcttgtttaccggtgctagcctggaaacgatgaaaaccaccgtcgtgctcacagcccttcccttcctcgtcattttactggtgaaagtcggcgggtttattcgctggctgaaacaggattacgccgacattccggctcatcaagttgaacattatctcccgcagacaccggttgaagccctggaaaaaacgccagtgctccctgcgggaaccgtattcaaaggcgacaactgagcgccatcatcctaacgataaaggtatccctatgagcaatctgagccctgactttgtactacccgaaaatttttgcgctaacccgcaagaggcgtggaccattcctgcccgtttttataccgatcagaacgcgtttgaacacgaaaaagagaacgtcttcgccaaaagctggatttgcgtcgctcacagcagcgaactggcgaatgccaatgattatgtgacgcgtgagatcattggcgaaagcatcgtgctggtacgcggtcgtgataaggttttgcgcgcgttctataacgtgtgtccgcaccgtggtcatcagttgttgagcggtgaaggaaaagcaaaaaatgtgattacctgcccgtatcacgcatgggcattcaaactcgatggcaacctggcccatgcacgtaactgcgaaaacgtcgccaatttcgatagcgacaaagcgcaactggttccggtgcgtctggaagaatatgccggattcgtcttcatcaacatggaccccaacgccaccagcgtagaagatcaattacccggcctgggcgcgaaagtgctggaagcctgcccggaagtccacgatctgaaactggcggcccgctttaccacccgcacgcctgccaactggaagaacattgtcgataactatctcgagtgctatcactgtggtccggcgcatccaggtttctccgactccgtacaggttgatcgttactggcacaccatgcacggtaactggacgctgcaatacggtttcgccaaaccgtccgaacagagctttaaatttgaagagggtacggatgcggcattccacggtttctggctgtggccgtgcacgatgctgaacgtcaccccgatcaaagggatgatgacggtcatttatgaattcccggtggattctgaaactaccctgcaaaactacgatatttacttcaccaatgaagagttaaccgacgagcaaaaaagcctgattgagtggtatcgcgatgtgttccgtccggaagatttacgtctggttgaaagcgtacagaaagggctgaaaagccgtggctatcgtggtcaggggcgcatcatggccgacagtagcggtagtggcatttccgaacatggtatcgcccatttccataatctgctggcgcaggtgtttaaggactaatgacatcggcggcggtattttccgccgctgggctgatttttgatggagtacagcaatgagtgactatcaaatgtttgaagtacaggtgagccaggttgaaccccttaccgaacaggtgaaacgcttcacgctggtggcaaccgatggcaaaccattacctgcgtttaccggaggaagtcacgtcattgtgcagatgagcgatggtgataaccagtacagcaatgcgtatagtctactgagtagcccgcatgacacctcttgttatcagattgccgttcggctggaggaaaacagccgcggcggttcccgctttttgcatcagcaggtaaaagtgggcgatcggttaacgattagtacgcctaataacctgtttgcgctaattcccagtgccagaaagcatctgtttatcgcgggcggtattggtatcacccctttcctgagccacatggcagagctgcaacacagcgacgtcgactggcagctacattactgcagccgaaatccagaaagttgcgcatttcgtgatgagctagtccagcatccgcaggctgagaaagtccatttgcatcatagtagtaccggaacacgactggaattagcgcgattattggcggatatcgaacctggcacacacgtttatacctgtggccccgaggcgctaattgaagcggtaagaagtgaagctgcgcgtctggacatcgccgccgatacgctgcactttgagcaatttgctatcgaagacaaaaccggcgatgcatttaccctggtgcttgcccgttccggaaaagagtttgtggtgccggaagagatgactattttgcaggttattgaaaataataaagccgcgaaagtggaatgtttatgtcgtgaaggggtatgcggaacctgcgaaacagcaatactggaaggtgaagctgaccatcgggatcaatattttagcgatgaagagcgtgccagccagcaaagtatgttgatctgttgtagccgtgcgaagggtaaacgcctggtgttggatttgtaatttgccgaagccggatgtggcgctgagcgcgcccagtccggcttcggaagattttactgcggatattcctgcaataaattgtgtaatgcttccgccatcagctcaccacgccagccggaaatcagctccggcaaattgttctgcggtttcagtttccagtgccagttcagcagttggttgatttgccgacggcttgccagcaattcggcgctgatcttatgcgtttcgctcacgtcagtaatcaggctcttaatcgctttaaacgctttacgataacccggcatgtccatcaggttaagcatcggctgcggtaaggcatcttccggcaatgtctgcgctttttccaccagcgctagcagcgttttaccgtgaaagcggatttcgctaccggataaacccaggctgtccagttcgcctaaacttcccggcatataacgcgctacgctccacaaatgctcttcacgcacgacaaagttcaccgccagatcgcgctctcgcgccttgcgcagtcgccagtcggctaacagttgcagacaggccagttggcgtgtgcgtaattgccaggcattggtgatatcacgccaggcatcttccggcgcaacgacttcctgacgacgcatttgcatcaggcggcattcatccagcgccgcaggtagccagccggaggcctccgtttctaccataagcttggcggtgatcggtaacagataccagacatccgccgctgcgtattcacactgacgttcggtcagcggtctggccagccagtcggtgcggctttcactcttgtccagcgtaacgccggaatactcttccaccatggaagcgaaaccccaactcatcgggcgtccgcagaaggcagcaaggatttgcgtgtcaatcaagggttgtggtaattcgccaaagacattgaggaacacttccagatcttcactgcctgcatggagaaattttgtgatggacggatcgcgcaggatcgctttcagcggactccagtcggtgatcccgagtggatcgattagcgccagatgctcgccatcgaaaagttgaatcaaccccagctgcgggtaataagtgcgcgtacgaacaaattcagtatccagggctatcgccggaaaggcacggacggcttcacacaaagaagccagcgcatcgtccgtggtaatcatttggtaattcaaattgttttctctttagtgggcgtcaaaaaaaacgccggattaaccggcgtctgacgactgacttaacgctcaggctttattgtccactttgccgcgcgcttcgtcacgtaattctcgtcgcaaaatttttccgacgttagatttcggtaactcatcacgaaactccaccagcttcggtactttgtatcccgtgagctgacggcggcaaaaagtcaccagactctcttcggtaaggcttggatcttttttcactacgaagattttcaccgcttcaccactggagccggaaggtacgccaacagccgcgacttcctgtacgccaggatgctgcatgacgacatcttcaatctcgttgggatagacgttaaaaccggaaaccagaatcatgtcttttttacgatcgacaatgcgcaggaatccttcttcatccattaccgcgatgtcgccggtgtgtaaccagccatttttgatgatttcatcggtagcatcgggacgctgccagtaacccagcatcacctgcggtcctttgacacaaagctcacccggttgacctggtggtacttcattatcatcatcatccaccagtttggcttccgtgctcggcaccggcaaaccgatgctaccactatgataatcaatatcatatgggttaacgctgaccagcggcgcacactcggtaaggccatagccttccagcagatactgtccggtcagtttcacccaacgctctgccaccacttgctgcactggcatcccaccgcctgcggaaagatgcagactggagaaatccagctgctggaactctttattgttcagcaacgcattgaacaaggtgttaacgcccgtgatagcggtaaacggatatttcgctaactcttttaccaaccctggaatatcgcgcgggttagtgataagcaggttctgcccacccagttcgataaacagcaggcagttaatggtcagggcaaaaatgtgatacagcggcagcgccgtcaccaccagctctttgcccggatgcaacagcggaccataggtcgcgttaacctgttccaggttcgccagcatattgcggtgagtcagcatcgcgcctttcgccacaccagtggtgccgccggtgtattgcagaaaagctaaatcttccggcaccagttcgggtttgacgtactgcatccggtagccgttatgcagtgcgctacgaaaactaatggcatctggcagatggtatttcggcaccaaacgcttgatgtatttaacaacgaaattgactaccgtgccttttgccgtagatagctgatcgcccatacgggtcagaattacgtgctgaacggcggttttatcaaccactttttccagtgtgtgagcaaagttagacacgataacaatcgcgcttgcgccgctatcgttaagctgatgctcaagctcacgcggggtatacaacgggttaacgtttacgacgatcatcccggcacgcaaaatgccaaacagcgccaccggatattgcaataaattaggcatcatcaacgcaacgcgatcgcctttcttcagccccaacccttgttgcaaataagcggcaaacgcgcgactgcgttcttccagcttgcggaaggtcattacctcccccatattcacaaacgcaggttgatcggcgtagcgcgcgacgctctgctcaaacatatctaccagagattgataacggtcagggttgatctccgtcggaacgtccgcgggataacggttaagccaaaccttcttcaattcttcacctctaaaatgcgtgttcgtcgtcatcgcaaccccaaatgatatacatgccgttaacataatattaactcatcataccagcttgataattacccaacgaaaaggttgcgaagcgcgtcactatttatttttatctttaccgtaagaatgcagaaacagcggaccagccgctgtttctttttctttaaaaacaagcaattattcagttacaactgtttgtactctcgcggggccgggattataccagccccatccgccgtagccatagggccagccacgaccgccataaaaccatggatcaatcggctgaggcggcataatcacctgctgggttaaatgccaacgtttgtaacccgttacttgcatcaccataaatttatagggcgtattgccgattttgccgtcaaccgcaccagtgattggcccgactaccgtaaccagttgtccacggaaatccaccgggtccagaaaaccgttcacatcggcataaatgcgaccgcgagaaggttctcccagcgtcggtctggctccgctgtccagcggtacggtagcaatttccaggcgagttttcccttgctggttttgtaccgcaaccactttgccaccaaagcgtgcctcctgaccaacgtacagctgcggcgcactcatcacccgaactaaatcttgttgcggcgtgggactgctgcctttaatggcgtccggcacagtgacacaaccgctcagcattagcgcaaacgtacctgccagtatgcctttgataacattcttttgaaccgccatggtgcgactcctttttttctcagggcatactcttaagattcattctttgcccggaagtttcttccatgcgacgttgttacgtaaataaaccggttcggcatgttccaccgccaccgttttaccctcagcaaacatctgacacgcaatcggcagcatatcttcagcagcaggcagtaacacttcgccatcgcgcaaaaccagcccgctctctttaccgagatccggccaagcttgccagcccgtccctaccgtcacccattcgccggaaagctgttgcattcgttcatggacgatttcgggtttgagtacggcttcggtttcttcaccgtgccagataccgttttcatcacgctgatattcggcccagtaaacttcgcccattcgcgcgtcaatggctgccagcacgcgggttgcgccgtttttgcgccacgccccttgcgccatcgtcattagcgtggagacgccaatcatcggtaattccgcgccaagcgccagcccttgcgcgatgccaataccaatgcgcacgccagtaaagctaccggggccgcgcccgtaagccagagcgttaatatcagtcagggaagttccgctggtggtcaggatatcctgcaccatcggtaagattcgttgagtatgttcacgagggcaaagctcaaaatgagcgttgacagtaccgtcgttccacagggcgacagagcaggcctctgtcgcggtatcgatagccagaattcgcatgggtcttcgtgcttagatcaataaaaaggcgcgcatcataccatactccgtaacaaattacctggaggatggtatcgcaaggaaacgaaccgcacgggcaatgtcacgggtgcgtggcgcgggcggcagactggcgagaaacgtcgcgccgtaaggacgcatcaccagccgattgtcacaaatcaccagcacgccacgatcgtcggcgtcgcgaatcagtcgccctaccccctgtttgagagtaatgacggcatctggtagttgcacttcatcgaacgggtcgccaccgcgcaaacgacaatcttccatgcgcgcttttaacagtggatcatccgggctggtaaacggcaatttgtcgataattaccaaactcaatgtatcgccacgcacgtccaccccttcccagaaactgctggttgccacaagaagcgcattaccggcgctgacaaattgctgcaacagttgccctttgctggtttccccctgcaacaatacaggaagcgtcatggtagcgcggaactgctcggccagatcgcgcatcatggcgtggctggtacaaagcataaaacaacgaccgttgttagcttcgatgatcggtcgcagcattgccgctaactggcgagcagaacctggctggttggtttgcggcagattgcgcagcacacagagtaacgcctggcggctgtaatcaaatgggctgggcaacagcaagctctcggcctgttcgatgccaagccggctggtgaaatgatgcagatcgtcgttcacgctcagcgttgcactggtgaagatccagctaccgggtttttgcgccattaactctttgaatttatccgccacgctgagcggcgtgagagccagagtaaaatggcggctagtgcattcgtaccagtagctgtagcccggctgattgatctcttttagccgcttcagccgtgtgcgatacaacgtggcgcgctcaaatgccgcatccagcaaggcggaacgccccagactcagtttcgccacgtcataacaaagttccagggtgtcatcgagcagtaaaaatgcccgctgaatttgcggattagctaacagctcacgcaggttaccgcgataacctggctcaccgagttgcagacgaaaatcctgcgcactctgggcaagacgatcagcgcacttttgtaactgctgggtgtcttttaattcggtgcggtaggcgatggtgatgtcttttgccaggtcgagcagttgtcgactggagagactctgaccaaaatactggctggcaatgtccggtagctggtgggcttcgtcgaagatcatgacgtccgcttccgggatcagttcgccaaatccactctctttaaccaccatatccgccagaaagagatgatggtttaccaccaccacatcggcgtccatcgcttttttacgtgctttgaccacaaagcaatctttatacatcgggcagtcgctgccaagacagttgtcgttggtgctggtgaccagcggccacgcctgactatcttccgccacgctgacgcaggtgctgatatcaccatcgactgtttgattagaccaggagcgcagcaggatcacatcgcttaagatttgtaccggcagatcgccccccgccagcgcctgctgttcgagacgttcgaggcagaggtagttactgcgccctttcagcagcgccacgttgcccgtatatttcaatgccttactgactgttggcaaatcgcggctgtagagctgatcctgcaacgctttactgccggtgctgataatgactttctttttcgcccgcagcgcaggagccaggtaagcgtaggttttgcccgtaccggttcctgcttccaccaccagcggctggcctttttctatcgcctgggtgacggctaccgccatctgtcgctgtggttctcgcggcttaaagcctggtatcgctttcgccagctgaccgtctggtgcaaaatcgtccgtcacactaccccctgttgatttgaacagggattatgtcaggatgagggcgctttcgccagttgaagtggtgacggcgacctcacattgtggcagtctttgcagcacgaaaatggaagtataatgaggacaaaatgatgactatcgttcgtatcgatgctgaagcccgctggtctgatgtagtaatccacaacaacacgctctactacactggtgtaccggaaaacctcgacgccgatgcctttgagcaaaccgccaacacgctggcacagattgacgccgtgctggaaaaacagggcagcaataaaagcagcattctggatgccaccattttcctggccgataaaaacgacttcgcggcgatgaataaagcgtgggatgcttgggttgtcgcgggtcatgcgccggtgcgctgcacggtacaagcgggtttgatgaacccgaagtataaagttgaaattaagattgtggctgcggtgtaagctttatcgaagcaaaataagtcagacgataatttatcgataatactggtcggttttacataaatcgaccagagaataagatattactgttgatgcttctgctaattcattatttatatttataatttcaattttatctataaaactaactatataaataaacataaacatgccgttgtgttcgccctttgattagcaactctggttttctttcttagctgaacaatctggttatagcgtgcggactgaccgttaaatttctccatcttactggataacacaccatgagctgctacctttaaaacacctgaatgtcaacaggttaactcgtgccatatcgttataatccctttgatattagatgcaaattaaggtcatatatagccttatcgataacatggttaattttaaggataagaatatgcctgctgtaatagataaagccctggatttcattggtgccatggatgtaagtgcgccaacaccaagtagcatgaatgaaagcacggcgaagggaatctttaaatatttaaaagaactgggagtacccgcgagtgccgctgatattacggcgcgagctgaccaggaaggctggaaccctgggttcacggaaaaaatggttggatgggcaaaaaaaatggagacaggtgaacgttctgtgattaaaaatcctgaatactttagtacatatatgcaggaagaactaaaagcactggtctgagttaaatttatatcagcataaatgggtcaggacgcttttaatcacatataaaaagcgtcctttttctcacaatcaaatgatcatcggcttctataacgaaatcgatacggattagtgtgttactcgtcttcatcctcaaaacgcgccacgattcgctcgccggagtggttggcacgcagctcttctgccaccagcgcgattgcctggccgctgctcatcccttgtgccatcagttcctggatccgctcgacagctttttgctgctgttcatgggtgagactaggtaaacctgcaaacattgttaactcctgctaaattgttggcgctaattatttcatgctacccggcacatagccagtagagtcaggactgatgaagacgttatctcccgctgtgattactttactctggcgtcaggacgccgctgaattttatttctcccgcttaagccacctgccgtgggcgatgcttttacactccggctatgccgatcatccgtatagccgctttgatattgtggtcgccgagccgatttgcactttaaccactttcggtaaagaaaccgttgttagtgaaagcgaaaaacgcacaacgaccactgatgacccgctacaggtgctccagcaggtgctggatcgcgcagacattcgcccaacgcataacgaagatttgccatttcagggcggcgcactggggttgtttggctacgatctgggccgccgttttgagagtctgccagaaattgcggaacaagatatcgttctgccggatatggcagtgggtatctacgattgggcgctcattgtcgaccaccagcgtcatacagtttctttgctgagtcataatgatgtcaatgcccgtcgggcctggctggaaagccagcaattcagcccgcaggaagatttcacgctcacttccgactggcaatccaatatgacccgcgagcagtacggcgaaaaatttcgccaggtacaggaatatctgcacagcggtgattgctatcaggtgaatctcgcccaacgttttcatgcgacctattctggcgatgaatggcaggcattccttcagcttaatcaggccaaccgcgcgccatttagcgcttttttacgtcttgaacagggtgcaattttaagccttagcccagagcggtttattctttgtgataatagtgaaatccagacccgcccgattaaaggcacgctaccacgcctgcccgatcctcaggaagatagcaaacaagcagtaaaactggcgaacagtgcgaaagatcgtgccgaaaatctgatgattgtcgatttaatgcgtaatgatatcggtcgtgttgccgtagcaggtagcgtaaaagtaccagagctgttcgtggtggaacccttccctgccgtgcatcatctggtcagcaccataacggcgcaactaccagaacagttacacgccagcgatctgctgcgcgcagcttttcctggtggcagtataaccggggctccgaaagtacgggctatggaaattatcgacgaactggaaccgcagcgacgcaatgcctggtgcggcagcattggctatttgagcttttgcggcaacatggataccagtattactatccgcacgctgactgccattaacggacaaattttctgctctgcgggcggtggaattgtcgccgatagccaggaagaagcggaatatcaggaaacttttgataaagttaatcgtatcctgaagcaactggagaagtaagacgtggaataccgtagcctgacgcttgatgattttttaagccgctttcaacttttgcgcccgcaaattaaccgggaaaccctaaatcatcgtcaggctgctgtgttaatccccatcgtccgtcgaccgcaaccggggttgttgctgactcagcgtagcattcatctgcgtaaacacgctggacaagtggcattccctggaggtgcagtcgatgacacggacgcaagtgctatcgccgccgcgctgcgcgaagctgaagaagaggtcgctataccgccttccgccgttgaagttatcggcgtgctgccgcccgtcgatagcgtcactggctaccaggtaaccccagtggtcggcattatcccgcccgatctgccgtatcgcgccagtgaagatgaagtcagcgcggtgtttgaaatgccgctcgcccaggcattacatctgggtcgttatcaccctttagatatctaccgccgtggtgatagtcatcgggtatggctgtcctggtacgaacagtattttgtatggggaatgaccgcaggcataattcgtgagctggcgctgcaaattggtgtgaaaccctgactatacttatctttacatctacaaaacactacttgagacaatcatcgcaatattagttaaatcgcggtttttgattagtttaattcatgtgaatagttaagccagtcgccgcgttccctcttacactatgcgctgttattagttcgttactggaagtccagtcaccttgtcaggagtattatcgtgattagtctattcgacatgtttaaggtggggattggtcccagttcttcccataccgtagggcctatgaaggcaggtaaacagttcgtcgatgatctggtcgaaaaaggcttactggatagcgttactcgcgttgccgtggacgtttatggtagtctgagcctgacgggtaaaggccaccacaccgatatcgccattattatgggtcttgcaggtaacgaacctgccaccgtggatatcgacagtattcccggttttattcgcgacgtagaagagcgcgaacgtctgctgctggcacagggacggcatgaagtggatttcccgcgcgacaacgggatgcgttttcataacggcaacctgccgctgcatgaaaacggtatgcaaatccacgcctataacggcgatgaagtcgtctacagcaaaacttattattccatcggcggcggttttatcgtcgatgaagaacactttggtcaggatgctgccaacgaagtaagcgtgccgtatccgttcaaatctgccaccgaactgctcgcgtactgtaatgaaaccggctatagcctgtctggtctcgctatgcagaacgaactggcgctgcacagcaagaaagagatcgacgagtatttcgcgcatgtctggcaaaccatgcaggcatgtatcgatcgcgggatgaacaccgaaggtgtactgccaggcccgctgcgcgtgccacgtcgtgcgtctgccctgcgccggatgctggtttccagcgataaactgtctaacgatccgatgaatgtcattgactgggtaaacatgtttgcgctggcagttaacgaagaaaacgccgccggtggtcgtgtggtaactgcgccaaccaacggtgcctgcggtatcgttccggcagtgctggcttactatgaccactttattgaaagcgtcagcccggacatctatacccgttactttatggcagcgggcgcgattggtgcattgtataaaatgaacgcctctatttccggtgcggaagttggttgccagggcgaagtgggtgttgcctgtagtatggctgctgcgggtcttgcagaactgctgggcggtagcccggaacaggtttgcgtggcggcggaaattggcatggaacacaaccttggtttaacctgcgacccggttgcagggcaggttcaggtgccgtgcattgagcgtaatgccattgcctctgtgaaggcgattaacgccgcgcggatggctctgcgccgcaccagtgcaccgcgcgtcagcctggataaggtcatcgaaacgatgtacgaaaccggtaaggatatgaacgccaaataccgcgaaaccagtcgcggtggtctggcaatcaaagtccagtgtgactaatacttcttactcgcccatctgcaacggatgggcgaatttatacccgctttctcgtctgctgtaatattccccactacacttccactgttgcgtcaggcgtttgtcgccatacgcttacagggtggcccgcatgcaaaaagcacaacggatcattaaaacctatcgtcgtaatcgaatgattgtttgtacgatttgcgcactcgttacgctcgctagcaccctgagcgtgcgatttattagtcagcgtaacttaaatcaacaacgggtagtacaattcgccaatcacgctgtagaggaattagataaagtactgcttcccctacaggcaggtagcgaagtcttgcttccgctgattggtctgccctgctctgtcgcccatttgccattacgtaaacaggcggcaaaactccaaactgtgcgatccattggcctggtgcaagacggcacactttattgctccagcatttttggttatcgcaatgtgcccgtcgtggacattctggctgaacttcctgcaccgcaaccacttttacgcctgacgatcgaccgtgccctgattaaaggcagtccggttttgattcaatggacgcctgcagcgggcagtagcaatgctggggtcatggagatgattaacatcgacttactgacggcaatgctgcttgagccacaactgccgcaaatcagtagcgccagcctgacggtggacaaacggcatttgctctatggtaatgggctggtagattcccttccgcaacctgaagacaatgaaaactatcaggtttctagccaacgctttccttttaccattaacgttaatggtccgggggctacggcgctggcatggcactatcttccaacacaattaccgctggcggtgctgctaagtttactggtgggctacatcgcctggctggcgaccgcttaccgaatgagcttttcccgcgaaatcaatctgggcctggcgcaacatgagttcgaattgttctgtcagcctttgcttaatgcgcgcagccagcaatgtattggtgtagagattttgctgcgctggaacaatccgcgtcagggctggattagtccggatgtgtttattcctatcgcggaagaacatcatttaattgtgccactgacccgctatgtgatggcagaaaccattcgtcagcgccatgttttcccgatgagtagtcagtttcatgttggcattaacgtcgcacccagccattttcgccgtggtgtgctgataaaagatctcaatcagtactggtttagcgctcacccgattcagcaactgatcctcgaaatcaccgaacgcgatgccttactggatgttgattatcggattgcccgcgagctgcatcgtaaaaacgtcaaactggcgattgatgacttcggcaccggcaacagcagcttttcctggcttgaaacattacgtcctgacgtgctgaaaattgataagagttttaccgcagctataggttctgacgcggttaacagcacggtgaccgatatcatcatcgcgctggggcaaagactgaatattgaactggtggcggagggcgtggaaacgcaagaacaggcgaagtatttgcgccgtcatggcgtgcatattttgcaagggtatttgtacgcacagccgatgccgctacgtgattttcccaaatggctggcgggcagccaaccgccgcccgcccggcataatggacatatcacgcccattatgccgttacgttaacgcttactcatcttcatcgtgcgccggttgctctttaacaatgcgaaccagatcaacacgataatcattggcttcaatgatggtgatatgcagtggccctacatcaatcacatcgcccacacggggaatgtgaccatttgcgctgatcacgaggcccgcgaccgtcgcgatatcatcgtcatcggcaaggtgctcaacatcaagcgcctgctgcaaggcatgcaaatctgtaccgccttttaccagccagccgtcaccatcagtaatgatttccggcgtttcgtcagcgtccgggaattcacccgcaatggcttccagcacatccagcggcgtgaccagaccttgtaccacaccaaactcgttggtcacgataacaaagctcccgcgagcacgacgcagcacgcccaacaggttgatcggatcgagggtttccgggacgataatcgccggagacgcgctagcaatcgccgccacatcaacgccctcttccagcgccaccagcagttctttagcacgtacaataccgatgatttcatccagttcaccgcgacataccgggaacagactgtgcggactagagagcagttgctcgcggatttcatcgaccccgagattagcgtcaacccagcttatttcaccgcgcggcgtcatgatcccgcgcagagaacggctcgccagcgtcagtacgccgttaatcatgtaacgttcttcttcggcaaatgcaccttccgggatcggcatcggcatcgggttatcggcatcgtgctgaacattggcctgacgtttcccgcccatcaaacgcaggatggcatcggcagtacgcgctcgcagcggcaaagtgctctggtggcgaataaagttgcgacgcgcaatctggttaaacacttcgatgatgatgctgaagccaatcgcggcatacaggtagcctttcggaatgtggaaaccgaaaccttctgccaccagactcagaccaatcattaacaggaagctcagacagagcaccaccaccgtggggtgctggttaacgaatcgcgtcagcggtttggatgccagcaacataaccgccatcgcaatcactaccgccgccatcatcaccggcagatggttaaccatccctactgcagtaattaccgcatccaagctgaagacggcgtcaaggatgacaatctgtgtgacgaccacccagaaactggcgtagcctttaccgtggccggaatcatgatcgcggttttccagccgttcatgcagttcggttgttgctttgaacagcaagaatatccccccgaacaacataatcaggtcgcgtccggagaaggagaaatccatgacggtaaatagcggtttggtcagcgtgaccatccaactaatcaggctcagcagccccagacgcataatcagcgccagacttaaccccagcaaacgcgctttatcgcgttgttttggcggcagtttgtcagcaagaatggcgatgaagaccaggttatcgatacccagcacaatttcgagaacaacaagcgtgagtagccccgcccaaatactggggtccattaagaattccatgacaagctcctgcttaaggaatagctattcgacgccagaaataatgcaggcgtaacgacaaaatgcaaacgaaaggtgcggcatagagtgccagaaaggcaggcgttaaaaggcctgatgctgaaatgacgtcggtgacgatccatactgcgggctactgccctatactccatggttgttaaacgggagttaaacatatcagagacgcctctgatttggcaaagatttaccttcctttgcaaacgaatgtgacaaggatattttacctttcgaaatttctgctaatcgaaagttaaattacggatcttcatcacataaaataattttttcgatatctaaaataaatcgcgaaacgcaggggtttttggttgtagcccttatctgaatcgattcgattgtggacgacgattcaaaaatacatctggcacgttgaggtgttaacgataataaaggaggtagcaagtgaccattgctattgttataggcacacatggttgggctgcagagcagttgcttaaaacggcagaaatgctgttaggcgagcaggaaaacgtcggctggatcgatttcgttccaggtgaaaatgccgaaacgctgattgaaaagtacaacgctcagttggcaaaactcgacaccactaaaggcgtgctgtttctcgttgatacatggggaggcagcccgttcaatgctgccagccgcattgtcgtcgacaaagagcattatgaagtcattgcaggcgttaacattccaatgctcgtggaaacgttaatggcccgtgatgatgacccaagctttgatgaactggtggcactggcagtagaaacaggccgtgaaggcgtgaaagcactgaaagccaaaccggttgaaaaagccgcgccagcacccgctgccgcagcaccaaaagcggctccaactccggcaaaaccaatggggccaaacgactacatggttattggccttgcgcgtatcgacgaccgtctgattcacggtcaggtcgccacccgctggaccaaagaaaccaatgtctcccgtattattgttgttagtgatgaagtggctgcggataccgttcgtaagacactgctcacccaggttgcacctccgggcgtaacagcacacgtagttgatgttgccaaaatgattcgcgtctacaacaacccgaaatatgctggcgaacgcgtaatgctgttatttaccaacccaacagatgtagagcgtctcgttgaaggcggcgtgaaaatcacctctgttaacgtcggtggtatggcattccgtcagggtaaaacccaggtgaataacgcggttagcgttgatgaaaaagatatcgaggcgttcaagaaactgaatgcgcgcggtattgagctggaagtccgtaaggtttccaccgatccgaaactgaaaatgatggatctgatcagcaaaatcgataagtaacgtattgtgttgattatcactcagttttcacacttaagtcttacgtaaacaggagaagtacaatggagattaccactcttcaaattgtgctggtatttatcgtagcctgtatcgcaggtatgggaagtatcctcgatgaatttcagtttcaccgtccgctaatcgcgtgtaccctggtgggtatcgttcttggggatatgaaaaccggtattattatcggtggtacgctggaaatgatcgcgctgggctggatgaacatcggtgctgcagttgcgcctgacgccgctctggcttctatcatttctaccattctggttatcgcaggtcatcagagcattggtgcaggtatcgcactggcaatccctctggccgctgcgggccaggtactgaccatcatcgttcgtactattaccgttgctttccagcacgctgcggataaggctgctgataacggcaacctgacagcgatttcctggatccacgtttcttctctgttcctgcaagcaatgcgtgtggctattccggccgtcatcgttgcgctgtctgttggtaccagcgaagtacagaacatgctgaatgcgattccggaagtggtgaccaatggtctgaatatcgccggtggcatgatcgtggtggttggttatgcgatggttatcaacatgatgcgtgctggctacctgatgccgttcttctacctcggcttcgtaaccgcagcattcaccaactttaacctggttgctctgggtgtgattggtactgttatggcagtgctctacatccaacttagcccgaaatacaaccgcgtagccggtgcgcctgctcaggcagctggtaacaacgatctcgataacgaactggactaacaggtgagcgaaatggttgatacaactcaaactaccaccgagaaaaaactcactcaaagtgatattcgtggcgtcttcctgcgttctaacctcttccagggtagttggaacttcgaacgtatgcaggcactgggtttctgcttctctatggtaccggcaattcgtcgcctctaccctgagaacaacgaagctcgtaaacaagctattcgccgtcacctggagttctttaacacccagccgttcgtggctgcgccgattctcggcgtaaccctggcgctggaagaacagcgtgctaatggcgcagagatcgacgacggtgctatcaacggtatcaaagtcggtttgatggggccactggctggtgtaggcgacccgatcttctggggaaccgtacgtccggtatttgcagcactgggtgccggtatcgcgatgagcggcagcctgttaggtccgctgctgttcttcatcctgtttaacctggtgcgtctggcaacccgttactacggcgtagcgtatggttactccaaaggtatcgatatcgttaaagatatgggtggtggcttcctgcaaaaactgacggaaggggcgtctatcctcggcctgtttgtcatgggggcattggttaacaagtggacacatgtcaacatcccgctggttgtctctcgcattactgaccagacgggcaaagaacacgttactactgtccagactattctggaccagttaatgccaggcctggtaccactgctgctgacctttgcttgtatgtggctactgcgcaaaaaagttaacccgctgtggatcatcgttggcttcttcgtcatcggtatcgctggttacgcttgcggcctgctgggactgtaagactgttgtacactaccggggccttttggccccgtttttttatctggaggattaatgacaatcacggacctggtactgattcttttcatcgccgcactcctggccttcgcgatctacgatcagttcatcatgccccgccgtaacggccccaccctgctggcaattcctttgctccggcgtggtcgcatcgatagcgttatcttcgtcggattgattgtcattcttatctataacaacgtcacgaatcatggtgcgttaataacgacatggttattaagcgcactggctctgatgggtttttatatattctggatccgcgttccgaagatcatctttaaacaaaaaggttttttcttcgccaatgtctggattgaatatagccgaatcaaagcgatgaacttgagcgaagatggcgtgttggtgatgcaattagaacagcgtcggctgttaatccgcgttcgaaatatcgacgatctggaaaaaatttataagcttctcgttagtactcaataagttatgaatttagccaaagctatgtttagtgtatttttaataatcagacatagcttaggctatattacctcttcccttatttgttatttattttaacgtttcattgatatataaatccaaatgaaaatcgttatcaataaagcaatgaaataatatattccaacagttgttttatattctcaaaatatgttaaggttgcgccctcatttggggagtagccgatttccagattccggaaatgtacgtgtcaacatactcgttgcaaaacgtggcacgtacggactgaatactttcagtcaggcgagaccatatgcacatcaatcgctatgcctgcatgaacgcgaaaaccatcacggcttgttgttcatgtatgcatgtttgctgggggcgatgatgtgttttatggataccccggtcaggacattgtcatgaatatcactgctactgttcttcttgcgtttggtatgagcatggatgcatttgctgcaagtatcggtaaaggtgccaccctccataaaccgaaattttctgaagcattgcgaaccggccttatttttggtgccgtcgaaaccctgacgccgctgatcggctggggaatgggcatgttagccagccggtttgtccttgaatggaaccactggattgcgtttgtgctgctgatattcctcggcgggcgaatgattattgagggttttcgtggcgcagatgatgaagatgaagagccgcgccgtcgacacggtttctggctactggtaaccaccgcgattgccaccagcctggatgccatggctgtgggtgttggtcttgctttcctgcaggtcaacattatcgcgaccgcattggccattggttgtgcaaccttgattatgagtacattagggatgatggttggtcgctttatcggcagtattattgggaaaaaagcggaaattctcggcgggctggtgctgatcggcatcggcgtccagatcctctggacgcacttccacggttaataagaacgctgccagaggtgaatattaaagtccgtctggcagtcgaacacttcttttgctgccagtgtttgccagacttctggcttcgcacgccaggcaaacggcgtcatctgcaataatgcgacggcttcatcaccgcgaagacgcatcggataacacaactccgcactctgctgtaatgtaaaaccttccagttgttctgcatgaggtgcatgaagatgtacttcattgtaaatcagccccttcagctccatcaaatgtcgcggtcccggcgtggcagtaatgacccagccgccgggcttcactactcgtgctaattcttctgctttacacggcgcgtaaatacgtattatggcgtccatactggtatcggaaaacggcaaacggtggctggaagcgacacaaaaagtgacctgcggatagcgtttcgccgccgcttttatcgctaccttgctaacatccagaccaaacgtggtgatttcgggcaacgcatcggcaaatgcgtgtgtgtaatacccttcaccacagccaatatccagcaccgccgtggccttatcatcaagccgttccctcagttgggcgacaattgcatcacgcagcggctgataatgtccggcatctaagaatgcgcggcgtgcttgcatcatttccgcgctgtcgcccggatcacgagaccgtttatgctgaacgggcagcagattgacatacccttctttcgccatatcaaactgatgtcgctggggacagatatagctgtttttttcacggctaagaggctgatggcaaagtggacaggaaaaagacatgacaactccggcaggatactaaaggccgcaagtgtaacgcgaatcacgcggcgggcaaatatccgaacgccaggagcgaagataaagcatagtaaaaagcctcgcattcgacgaggctttatagcgagattgaagcgtattcacacttcagatcagtggattcgatcagatagctgttacgttaacagctgccggacctttctggccgtcctgaatttcgaactcaacgttctgaccttcagccagagttttgaagccattaccctggatagcggagaagtgtacgaacacatctttgctgccatcagccggagtaatgaagccaaaacctttagactcgttgaaccacttaacctgacctttaatctttgccatttgaaaaattccttagattgttttcttcgcccgcaggcataacatagataaaacactcacattactgcaactggcaccaatataaggctcggcagagaagcggtattcaacgtcaacgtgtttactcaggacttctttactgaaaatgccacacataaacagaactgtacctcgtttaacccgaaatctgttatcacatacaacgttaattatggcaagccatttttaaacatgtctcgatcagacgcacaaatctcgatacgtcttccactttttttgcacacttatgcaacggaatacgcgccgatatatcattgtgcttaaccttgccagttcaggcagatacttaaactggcgtattttctaacatagttcaataagttcagttgttccaggccagtgggagaagttattacatagtgcgtgcaatatcacattttttgctatgcaatgaataaaaagttatatcactttttctcataaaacagtcagttaacggctattaattaccctaaagagaagtcaatccccaaagggattgtaaatttaaaataagaaaaattgatgaatgagcaaaaaaatcaagagagaaacgtttcgctaataaataataccacgcttaatcacaaatccgatgtaaacatcctaataaattaatggggtaaatatctttttctgatatcccgttacgcaaataaataatatgataattatttgaagtcagaccagagttttaatttgaagcagttgcaccatgacagtgcgtataatcaggatgaattgagtaacccttcaacgacggggttactcaagattgaggaaggattatcgttcggcgaccagacgaataatatcttcgtcttcaacgcttttttgactctcaacggtctttttatctgctttctctggttcgtttgcttcgcacaaacgacgtaacagtgcattttgacgtttttgctgatccagcaacgcctcaagcagttcaatctgttcgttagtccgactactggcacgattgataaaaaaccacaagatgagcccgataagaagaaccaccacgcttacaaccaaagacgcaatgttcatcacgccactatttacaacttcgttcatttcaccacctctgagtagaggcgctattctaccactgctggagaggaagaaaatctagtgctgaaaaaatgatatcaccacgggataaactggttaatggcacaaattccgctgaaaaattgtacatcctgatcgcacatcatgttgaatacctgcgcccaaagcagcaagcaagccaacaccacgacaaccagaacgacccatcgaaactttttcactccaatctccgtttcacctaccttatgtcattaaactagcatgcgttagttaaacagcgcctaactatgtcgatattcgtgctttttcggaatgagtcgcttgcttcagcgcatattgccgctacgattaagcgaacataaaaagagaagaggttgtaatgcgattcatcattcgcacagttatgctgatagcactggtatggataggattattactcagcggatatggcgttttgattggaagcaaagagaatgccgcaggattaggtttgcaatgtacctatctgactgccagaggcaccagcacggtacaatacttgcacactaaaagtggtttttttggggataacagattgcccgctgttacgcaaaagcaatatcgtggtcgataatggttaagggcaataaataaccagattctcactcctgagtaaaatactcttatagcaagcgcgtttaatataacgccaccttcaactttatttttctcatgctaaataaagaacctgtctgtttgatattccgacaggttcttactctcatcagaacggatagtcgtgataacccatttgggcagaaattttgcgcgctgcggtatgcaacattgcgacatattcctgtaaacgctcttcagagaaacgcaacgtcgggaaggagatgctcaaaccggcaatgaccacgccaaagcgatcaaataccggtaccgcaatgcatcgcagcccttcttcctgctcttcattatcttcgccatacccctgctcgcgcacctggtccagaacgggtaataacgcttctgtactggtgatggtccgctcggtactgcgtttatactccacgccctcaagaatttgcttcacttcatcgcgatcgcgccatgccagcagtaccttaccaatcgcggtgctgtacagcggattacgacgcccaatccgactatacatgcgcaaattgtacatagagtcaattttgtgaatgtaaacaatactgtcttcgtccagtgcgccgaggtggatagtttctttggtcaggcgggagagctcacgcatctggatatctgcgctacgaattaaatcgacgttttgtaacgcgcgagcgcccagttcaaacaatttcagggtcagggaatatttctcgctctccccttcctgcgccacataacctaaggttttcatggtctgtaaaaagcgataaacggtgcttttactcatcatgacgcgctggctcagctcggttatccctatttcgcgctcttcacccagcgcctgcaaaatgccaaaaacttttagcacggaagatacagaatcaggctgtttatccagatctgcgttagccatttatcacctcattgcgagtgttttataaaaatcagaactgttttttattataatttcgcaccagggtggtcgcaatccatcttttgccggttagttacaattctgcgacatccaccgtgaatatcagtgctagaatcatacccctgttgattattcaccaaagatataaaattcctatgccaaaagttcaggccgacggcctgccattgccccagcgatacggtgcgatattaaccattgtgattggtattagcatggccgtccttgacggcgcaatcgccaacgtcgccctgccaacaatcgccacggaccttcatgccacgccagccagttccatctgggtagtgaacgcctatcaaatcgccattgtcatctccctgctcagctttagctttctgggcgatatgtttggctatcgacgtatttataaatgcggtctggtcgtttttctgttgtctagtctgttctgcgccctttctgatagcctgcaaatgctcacccttgcgcgtgtcatacaaggtttcggcggtgcagcgttgatgagcgttaataccgcacttatccgcctgatctatccacaacgttttctgggtagagggatgggcataaacagctttattgttgccgtctcttctgctgccgggccgacaattgctgcagcaatcctctccatcgcatcctggaaatggttatttttaatcaacgtaccgttaggtattatcgccctgcttctggcgatgcgttttctgccacccaatggttctcgcgccagtaaaccccgtttcgacctgcccagcgccgtgatgaacgcgttaaccttcggcctgcttatcactgcgttgagtggtttcgctcaggggcaaagcctgacgttaattgctgcggaactggtggtaatggttgttgttggtattttctttattcgccgccagctttctcttcccgtaccgctgctaccggtggatttactgcgtatcccgctgtttagtctttctatttgcacatctgtttgctctttctgcgcacaaatgctggcaatggtttccctgcccttttacctgcaaaccgtgctcgggcgtagtgaagtcgaaacaggtttacttctgacaccgtggccgttagcaacgatggtgatggctccgctggcaggctatttgattgaacgcgtacatgcaggattgctgggggctttagggttgttcatcatggctgcggggcttttttccctggttctgctgcccgcgagtcctgcggatatcaatattatctggccgatgatcttatgtggtgctggatttggcttattccagagtcccaataaccacaccattattacctccgcgcctcgcgaacgtagcggtggagccagtggcatgttaggaacggctcgtctactgggtcagagtagcggcgcggcgctggtggcgctgatgctaaatcagtttggagataatggtacacacgtcagcctgatggctgcggctattctggcagtgattgctgcctgtgtcagtggtttacgtatcactcagccacgatccagggcataaaaaaagcgcgtcgatcaggacgcgctttttagtatttacttcatattacttcaggtattcacccgtacgcagagcttcaattcgtttatccagcggcgggtgggtcatgaacaactcactgaggcttttgctcttaccgttaatgcagagagccatcatgctggttgcttcttgcggttcatagctggttttcaggcgctgcagcgcggcaatcattttctcgcgaccaaccagttttgcgctaccggcatcagcatggaattcacgatgacggctgaaccacatggtgataatgctcgccagaataccaaacaccagttccagaaccgttgcaaccgcaaagtagatcagcgggttgccgttgctctcttcaccttcatcacgatttccgcccataaaacccgcggcaagctgcgccagaatacgggaaataaagataacgaaggtgttcaccacgccctgaatcagcgtcatggtgaccatatcaccattggcgatgtggctgatttcgtgagcaattaccgcctcggcttcatccgggctcatgttctgcagcaaaccggtgctgacagcaaccagagaggcatcacggcgcgcaccggttgcaaaagcgttgatgtccggcgcatggtagatagccacttgcggcatagcgatccccgcctgacgagcctgggttgctacagtattgaccagccaacgttccctttcgttacgcggttgctcgatcacttccccgccaacagatcgtaatgccatccatttggacatcagaaggctaacgaaggaaccaccaaaaccgaacagcaaggccatgatcatcagcccctgaacgctgctgctctgtatccctgtcaggctcagtaccagcccgaaaacgaccattacggccaggttcgttagcaggaagagcgcgattcgcatcataattttctttttacctcagtttaacaaaacgcaatatgcgatacccacatcgtatgggttacgcgactattttcaagtctggatagtgcgtaagtcaccagaaagacacaactttacattttgtagcatctgatttacggcatcttgtcgctgttaaaaaatcaggcacaatttcttgtgcctgattgatattacttgacgggagcgggttgttccgcgggtctggctttttcaagcttcgccagatcgagtgcgatattcaccgtctcatccagataaggatccggctcctggtaatctttcggtagatcatccagtttcttcaactccggtttaccttcgcgtttaaagcgttcgttcaaacgcgccagacgcgtcgcatcatcttcattattctctttctcacgcacagcgtaattcagagaaacgatattgcgcttgtccttcatagcgttgaagcgcgcgatatccttcatgatgttctggaactcaggatctttcgcgatacgcgcattatgttccttcagcagctccggttcaaaggccgttaaatctccacttttcacataagtcgcggcatcaatgctatcccacggcagcgcgttatcttcgaatttctcacccgtttccgtttcttcattacccgtcggcatgatgatgtctggcgttacgcctttacgttgcgtactgccgccgttaacgcgatagaatttctggatcgtgtactgcacagaacccagcgctggccattcaggacgtaacatctgatcgtaaatacggttcaaactacggtattgctgaacggtgcctttaccaaacgtcggttcacccacaaccagcgcacgaccgtaatcctgcattgccgcggcaaagatttcactagcgctagcactgaagcggtcaaccagcaccaccagcgggcctttatagaaaacctgtccgtcggtatcgctatcttcacgaaccttgccgttgttatcgcggacctgaacaatgggacccgcaggaataaacagaccggagaggcttacggcttcagttaacgccccaccgccattgctacgcaggtcgatgatgacgctgctgacattctgtttttccagtttctgcagttgcactttgacatcgtctgtcaaacccacatagaagcccggaatatccagcacgccgactttctctttaccgacggtcttcacgctcattttaaccgcgcggtcttcgagacgaatacgttcacgggtcaacgttacagtacgggtcttggtccctttaccagcaggtaaaatttccagacgaactttactgcccttcggccctttaattaaggcaaccacatcatcaagacgccagccaatcacgtcaaccatcggcttgcctgtttgaccaacaccgacaattttgtcaccaacgctgatagctttactcttcgctgccggaccacctgccaccatgctattgataacggtgtagtcatcatccatttgcagcactgcgccaataccttccaggctcaaactcatttcagtgttgaactgttcggtattacgcggggaaagatagttggtatgcgggtcgatttcacgcgcaaacgccgtcattgccaggctgaaaacatcttcgctgttggtttgcgccagacgacgaatggcaaatttgtagcggcgagtcagggtttcacgaatttctttatccgtttttcctgtcagcttcaggcttaactcgtcgaatttgactttactgtcccacagcgcgttcaactcagcctcgtttttcggccagggcgctttgctgcggtcaaggttataagtgtcgttgccggtgaaatccatcggcttttccagtacgctcaaagcgtactggtaacgctcaaaacggcgcttttgcgccagattgtagagatcgtagaaaacgtcgagtttgccactacgcagttcatcgcctaactcggttttctttttcgcgaactgttcaacatcgcttgccagcagcacgttgtggctgtaatcgagcagattcaggtagcggtcaaagattttggcgctaaatgcctgatcgaggtcgaactggcgataatgagaacgggtgaagcggctcgttacgcgctcacttaccgtcgcatgctgcgtctcttcctttaataccggaatttgatcagcacgcgtgatatcttctacagcgaaggtctggcctgctattgcaagcaggccagctaacgcggtaagcctaaaaaacatgttcatgcctggcccggcctccgtttcagaacaccaggtgttctgcgcgcacaatcaaagacataccgctattcagctggacgcggacgccgtctttggtgatttctaatacggtggcatccatcgcgttttgacccgctttcaccttcagggcttgtccgacagtcagagcactaatgtcagaaaccggggtgtgctgttcttcgcgaggtgcttttactgtttttggcgctttctctaccggcttttgcgcacgaggtttacgttcagcgccttctttgcggcgtggcgtagtcggacgtggcttgcgttcgcggcgcggtgcgtcttctttctcaccagcagttgcggcagcttcgcgttttttcgcttgttgttcagcacgctgtgcctgaacacgcgctttcgcttcttcaagctgcttgcgagcatgctctacatgttgctcgtccagctcaccgcatgggttgccgtcaagatcgacacgcgttgcgccgggtttaacaccgtaaagataacgccagctgctagtgtagagacgtaaagcggatcgcaattgcgttttgctcaggttcatttccccagcaacacgatcgaccaaatcctgaaaaataccgattttcagcggacgcgcttcaccttccgcactgaaacagtggggaaaacgttcggccagaaacgcgattacttctttactgctattcaacttaggttgattttccatgaaatttcctgattacaacggacgtagccaacaagcgcaggcatgaacaggcgtcattataatgacgctatcagtaaatgctacgttatccgttgattatcctgcgacgctcgcaaagaattttttgtaatccgtcgttgcaagcactttttcaagctgtgccacaagctgacgtaagccttgctcgtcctcgtctgtaaagcgaccgaagacggtactatcgatgtcgagaacaccaataatctgatttttcaccaccagcggcagaacaatttcagaattactcgccgcatcacaggcaatatgcccgtcaaacacatgaacatcctcgatacgctgcacttgattgcgggcaaccgcagtgccgcacacgccgcgcccgacgggtatccggacacaggcaattttgccctgaaatggtccgagtaccagtgtatcgtcctcaagcaaataaaaacctgcccagtttatgtcagtgagacgctcatataacaacgcactggtgttcgcaagcgttgccagaaaactggtttctcccgccatcagcgcgttaaagtcgcgatttaaatccgcgtaaaattctgttttgttcattatataatcacttggttgtcttacctggatctgccagcctattaaaataagcattaaatgcgttaatgctcaagatcattcccatcatgggttaagattaatgttaattcttattacatttggcacgtcatggctcttaacacaccacaaattacgccgacaaaaaagataacagtgagggcaatcggcgaggaactgccgcgtggtgattaccaacgttgcccgcaatgtgacatgctgtttagcctgcccgagataaattctcatcaaagtgcctattgtccgcgctgtcaggcaaaaattcgtgacgggcgcgactggagcctaacgcgcctggcggcaatggccttcaccatgctgttgcttatgccgtttgcctggggcgaaccgctgttgcatatctggctgttaggcattcgtattgacgccaacgttatgcaaggcatctggcaaatgaccaaacagggcgatgcgataacggggagcatggtctttttctgcgttattggtgccccgctcattctggtgacctccatagcttatttatggtttggtaaccgactgggaatgaatttacgtccggtactgctgatgcttgagcgacttaaagagtgggtaatgctcgatatctacctggtcggcattggcgttgcttctataaaggtacaggattatgcccatatccaggctggtgtcggcttgttctcttttgtggcgttggtgattttaacgacggtgacgttgagtcatcttaatgtcgaagaactgtgggagcgattttatccgcagcgccccgctacgcgtagggacgagaaacttcgtgtctgtcttgggtgccattttaccggctatccagatcagcgtggtcgctgcccgcgttgccatatcccgctacgcctgcgtcgccgtcatagtctgcaaaaatgctgggcggcgctgttagcgagtatcgttttattgttacctgccaacctgttgcctatttctatcatttatctgaacggaggacggcaggaagatacaattctttccggaattatgagcctggcaagtagcaacattgcggttgcaggaatcgtgtttatcgccagtattctggtaccgtttactaaagtgatcgtcatgttcactttactgttgagcattcattttaaatgccagcaaggtttacgcacacgcattctgttactgcggatggtgacctggattggtcgctggagcatgctcgacctgtttgtcatatctttaaccatgagcctgattaatcgcgatcagatcctcgcttttactatgggaccggctgcgttttatttcggcgcagcggtaattttgactattcttgctgtggaatggctggacagccgcttactttgggatgcacatgagagtggaaacgcccgcttcgacgactgaataaccgcttactttgggatgcacatgagtcaggaaacgcccgctagcacgactgaagcgcagattaaaaataaacgccgtatcagtcctttctggctgctgccgttcatcgcgctaatgattgccagttggctgatttgggacagttatcaggaccggggtaataccgtcaccatcgactttatgagcgcggatggtattgttccaggccgtacgcctgttcgttatcagggcgttgaagtcggaacagtgcaggatatcagcctcagcgacgatcttcgtaagattgaagtcaaggtcagcatcaagtccgatatgaaagatgcgctgcgcgaagagactcagttctggctggtgacgccaaaagcaagcttggcaggtgtctccgggctggacgccctcgtcggtgggaactatatcggcatgatgccgggtaaaggtaaagagcaggatcactttgtcgcactcgatacccaaccgaaatatcggctggacaatggcgatctgatgatccacctgcaagcccccgatctcggtagcctgaacagcggtagtttggtctatttccgcaagatcccggtgggaaaagtctacgactatgccatcaatcccaacaagcaaggcgtggtgattgatgtcctgatcgagcggcgttttaccgatctggtgaaaaaaggtagccgtttctggaacgtttccggcgttgatgccaacgtcagtatcagtggcgcgaaggtgaaactggaaagcctggcggcactggttaacggtgcgattgccttcgatagtccagaagagagcaaacctgccgaggcggaagatacctttggtctgtatgaagatctggcccacagccagcgtggcgtaataataaaactggaactgccgagtggggccggattaaccgccgacagcacgccgttaatgtatcaggggctggaagtcggacagctgactaaactggatttaaatcctggtggtaaagtcacaggggaaatgaccgttgatcccagcgtcgttaccctgcttcgtgaaaatacccgcatcgaattacgcaacccgaaattatcccttagcgatgctaatctcagcgccctgctgaccggcaaaaccttcgagctggtgcccggcgatggcgagccacgcaaagagttcgttgttgtgccaggcgaaaaagcactgctgcatgaacctgatgttctgacgctgaccctgaccgcgccggaaagttacggtattgatgcgggtcagccgctcattcttcacggcgtgcaggtaggccaggttatcgatcgtaaactcaccagcaaaggcgtcacctttaccgtcgccatcgagcctcagcatcgcgaactggtaaaaggcgatagcaaatttgtcgtcaacagccgtgtcgatgtgaaggtggggctggatggcgttgagtttctcggtgccagcgccagtgaatggatcaatggcgggatacgtattctgccgggcgataaaggtgagatgaaagccagctatccactgtatgccaatttggaaaaagcgctggagaacagccttagcgatttacccaccacaaccgtgagtttgagtgcagagacgctgccggatgtgcaggcaggaagcgtagtgctgtaccgtaaatttgaagttggtgaagtgattaccgtgcgtccgcgagctaacgcgtttgatatcgatctgcatattaagccggagtatcgcaaccttctgaccagcaatagcgtgttctgggcagaaggcggggcgaaagttcagctgaatggtagtggtctgaccgtacaggcatccccgctctccagagcattaaagggagccattagcttcgacaacctcagcggtgccagcgccagtcagcgtaaaggcgataagcgtattctgtatgcttccgaaacagcggcccgtgcggttggcgggcagattacgcttcacgctttcgatgccggaaaactggcggtcgggatgccaattcgctatctcggtattgatatcgggcaaatccagacgctggatctgattaccgcacgcaatgaagtacaggcaaaggcggtactttacccggaatatgtccagacctttgctcgcggtggtacgcgcttcagtgtggtcacaccgcaaattagcgcagctggcgttgagcatcttgatactatcctccagccgtatatcaacgtcgaaccaggccggggcaatcctcgccgcgactttgaattacaagaggccaccattactgatagccgttacctggatggcttaagcattattgttgaagcgccggaagccggtagcttaggcatcggtacgcctgtgctgttccgtggtctggaagtcggtacggttacaggaatgacgctggggacattgagtgatcgcgtgatgattgcgatgcgcatcagtaaacgctatcaacacctggtgcgtaacaattccgtcttctggttggcaagcggttacagtctggactttggtctgacgggcggcgtagtgaaaaccggcacctttaaccagtttatccgtggcggcatcgccttcgccacgcctccgggtacgccactggcaccgaaagcccaggaaggcaaacacttcctgttgcaggaaagtgaaccgaaagagtggcgtgaatggggaactgcgcttcccaaataatgcccactgctccggcgtgcctgcgccggagcgtttatgctaaactgcgcgcctgtttttttgccagtggtacatgctcgtggcccaacacaccgtttatttcccggacgcctttctgacacaaatgcgcgaagcgatgcctagcacgctcagttttgatgattttcttgccgcctgtcagcgcccgttgcgccgcagcattcgcgttaatacgctgaaaatctccgttgctgatttcctgcaattaaccgctccttatggctggacgcttacgccaattccgtggtgtgaagaaggtttctggattgaacgcgacaatgaagatgcattgccattgggtagtaccgccgagcatttaagtggcctgttttatattcaggaagccagtagtatgttgcctgttgccgccttgtttgctgacggtaatgcaccacagcgggtgatggatgtcgctgccgcgcctggctccaaaacgacgcaaatttccgcgcggatgaataacgaaggggcaatccttgccaatgagttttccgccagtcgggtaaaagtgttacatgccaatatcagccgctgtggtatcagtaatgttgcgctcacacattttgatggccgcgtgtttggtgcggcagtgccagaaatgttcgatgccattttgctggacgctccctgctctggcgaaggcgtggtgcgtaaagatcccgatgcgctaaaaaactggagtccagaaagcaatcaggaaatcgcagctacacaacgggagcttatcgacagcgcctttcatgcattacgtcctggtggtacgctggtttacagcacctgtaccttaaaccaggaagaaaacgaagccgtttgcctgtggctgaaagagacttaccccgacgcagtagagtttttaccacttggcgatctcttccctggtgcaaacaaagcgctgaccgaagaaggctttttgcatgttttcccacaaatttacgactgcgaaggcttcttcgttgctcgtctgcgtaaaactcaggcgattcccgccttacccgcccccaaatacaaagtcggtaattttccgttcagcccggtgaaagatcgcgaagctggacaaattcgtcaggcggctacaggtgttggcttaaactgggatgaaaacctgcgcctctggcagcgtgacaaagaactgtggttgttcccggtgggcattgaagccctgatcggtaaagtccgattttctcggttggggattaaacttgccgagacgcacaacaaaggttatcgctggcagcatgaagcggttattgctcttgccagtcccgataatatgaatgcattcgagctgacaccgcaggaagcggaggagtggtatcgcgggcgcgatgtttacccgcaagccgcgccagtggcggatgatgtattggttactttccagcatcaaccgattggtttagccaaacggattggtagccgattgaaaaacagctatccgcgtgaactggtgcgcgatgggaaactttttaccggtaacgcctgacagcgcacaaaaaaagcgcactttttgactggcacattcggctgcctcaactaggctgaaaaatggtgcgatcggactggtcgtaccacaatcggcagctaaatggagagcacgaagatgaaaaccagtgtgcgcataggcgcttttgaaatcgacgacggcgaattacacggtgaaagcccaggtgatcgaacgttaaccattccttgtaaatctgaccccgatttatgtatgcaactggatgcctgggatgctgaaaccagtatccctgccctgctaaatggcgaacactctgtcctttaccgtacccgttacgatcaacaatctgatgcctggattatgcgtcttgcctgatccaaaaagaacccgtcggcatggcgggttatttgtcctggttattcccccgttgtaaaatctctcctaaacttaacggtacggcaccacacttcggggatgaaatgttcgcgctggtactttttgtttgctacctggatggcggttgtgaagatattgttgtggatgtctacaacacggaacagcagtgtctttattctatgagcgatcaacggatccgccagggcggttgttttccgattgaggattttatagatggtttctggcgacctgcacaggagtacggtgatttttaattattgcaattgcacaagagtcagttcgcccccaaagacagcaccggtatcaatataatgcaggttgccaatatccacgcgatgtcgcaacggtgtatgaccaaaccagaaatgatcagcacctgtaattccctgccctttttggcgttcacctaatcggctgcggctccacaagacctgatgcaaatcaacgtccttttgccattcataaacatcatctggataatcggcatgagcaataatatgcttgccggtgcgactgtgtacttcaagaataaagggcaaatgctgacatttttccagcgccgttttcgcttgtttctgttgattatctgccagcgcaataaaccagtcgccgccattcatcaaccacaaagacatctgctgggatgccagcgcatccatcgccatctgttcatgattgcctcttaccgcacaaacccaatgttgttccagtaactgcagacaacgtaaactttgcggcccacgatcgataacgtctcccacactgataagtaaatctcgccacggatcaaaacgacaatgccataatttgcggcgcaactgctcaagacaaccgtgtatatcgccagaaagccagatatgtcgccattgatgacccgcaattctctgataaacgggcgcaggctgtttcatcaatattttcctcccgcgctaaagatcacataatcttaacaagaatgttaaaaaacgctggactcagacagtagagtgtgtgttatggttgactataaagtcagcgaaggaaatgcttctggcttttaacagataaaaagagaccgaacacgattcctgtattcggtccagggaaatggctcttgggagagagccgtgcgctaaaagttggcattaatgcaggcttagttgccttgccctttaagaatagatgacgacgccaggttttccagtttgcgtgcaaaatggtcaataaaaagcgtggtggtcatcagctgaaatgttaaaaaccgcccgttctggtgaaagaactgaggcggtttttttattggaaatcaaaaggctattttaggtaattaacagagtttttcagctcgttctataaacggtgccagactcattttttcgccgggattgttaggatcatcaatctgaatcacgctaatgggttgggcattggtcttcccactggcaacttccttttgtgcgatatcgtttaaaggatactgcacgagggtactcggattaataacatacaaagcattacccggtcggcaagtcagcatcacctcttcgcgattaaacgcccatttgtctttacccacttcaaaacgactgacggtaatcacctgcggtgcagccagcgccgctgcagaactggtgagtaacagaaacgccagaatactttttttcatcattttcgtaatccatcaaaaaggttcgagagtcgcaagcaggctgatgatcaccagcactaccgcacctatcgcccattcgagtttagtcatccacacaaaccagggtgccgcacgatcttcatcctgcctcatgcgcggtacaagaacataacgattagccagcgcaatgaccaccataatcatcaccaggatggctttgagcaataagagttggccccagtaagtcgtaagcgtggggggaaatccggtaatcaacaatgcattaagcacgccgcttgccagtacgccgatcaccgcaaaatgcccgcaccaggaaaaacgcatcagcgcctgaatagcctggtgtcgccaacggcctttgatgagttgcatacaccagagcaccggcagtaatcccccaaaccacgccgccgcacaaatcaggtgaatcgcgtgattagtctgatggattttcgctgttaccccttcattcagcgtcgcatgccccactcccgccagcagaataaattgcgcggtagtgagcataaacagcaaacgtggcatattccgcggttgcataagggcgacgatcaacgttacgagggcgagaacaatttgccataaccagatgccaccaaactgcgtttgcaaaacagcctgccaaatgtttgggctaaatacatctgtccatcccgttcccatcaacccgccctgaacggcgagcattgcagtggcactgatcaaactccagacggcagcgtgctgttgtaaacgcagaaaacgcttcgccagcaagcgacgaatcgtcaagggggccagccaggcaccgtacattgcgaagccaaaaaccagcatcaggctggtgaaatggataaatcgcagcgcgatccaggtaaacgccagcatgatttatttcacgctaaaggtgtagtgtcctttcgttttatgcccgtccacgctaacaacatgccagtcaacggtgtaggttccgggtttcaggctatcggccagtggaacaatcagttgcttttggtcctgctcatttcgcttcgccggtaatgttttaatattttcgttttttggccccgtgatttttgcaccactgaatcctgtttcaacaccttcgctgaagtttaaagtgattgcctgcggtgcagctgtcacttgcgcgtttgccgcaggatactgatgcgttaaatgcgcatgtgcccagacggaaggtgtcaccaagctagtggtcaggattgccagcgcgtagcgaagggagcgtgcagtactagccatattatctattcctttttgtaataacttttttacagagcataaccttgtctaatgtctgagtcgaggatcatcaattccggcttgccatcctggctcactcttagtaacttttgcccgcgaatgatgaggagattaagaatgctgaagaatctggctaaactggatcaaacagaaatggataaagtgaatgtcgatttggcggcggccggggtggcatttaaagaacgctacaatatgccggtgatcgctgaagcggttgaacgtgaacagcctgaacatttgcgcagctggtttcgcgagcggcttattgcccaccgtttggctagcgtcaatctgagtcgtttaccttacgagcccaaacttaaataaaacttatacagagttacactttcttacataacgcctgctaaattatgagtattttctaaaccgcactcataatttgcagtcattttgaaaaggaagtcattatgagcttctggaaagttgcagcagcgcaatatgagcctcgtaaaaccagtctcaccgaacaggtagctcatcatctggagtttgtgagggccgccgccaggcaacaatgtcagctgttagtttttccaagcctttctttactggggtgtgattatagccgacgtgcccttcctgccccacccgatctcagtctgttagacccgctttgttatgccgcaacgacctggcgaatgaccatcattgccggccttcccgttgaatataacgatcgctttattcgtggaattgcggtgttcgcaccgtggcgaaaaacgcctgggatctaccatcagagtcatggtgcatgtctgggccgtcgttccagaaccatcacggtggtcgatgaacaaccgcaaggtatggatatggacccgacctgtagtctgtttactacagggcaatgtctgggagaacccgacctgctggcgagcgcccgtcgcttacaattttttagtcatcagtacagcattgccgtgctgatggcaaatgcccgtggtaacagtgcactatgggatgaatatggtcgtctcatcgttcgcgccgatcgtggtagtttattgttagtcggtcagcgtagtagtcagggttggcaaggcgatatcattccattacgctaagctttttcggcctggagcatgccatgttgcgcattatcgatacagaaacctgcggtttgcagggagggatcgttgagattgcctctgttgatgtcattgacggaaaaatcgtcaaccccatgagccacctggtgcgccccgatcgtcctattagtccacaagcgatggcgattcatcgcatcaccgaagccatggtcgccgataaaccgtggattgaagatgtgatcccacactattacggtagtgaatggtatgtcgcgcataacgccagctttgaccgccgcgtactgcctgagatgcccggtgagtggatttgcactatgaaactggcccgtcgtttgtggcctgggatcaagtacagcaatatggcgttatataaaacacgcaagctcaatgtacagacgccgccgggcctgcatcatcaccgcgcgttgtatgactgttatatcaccgccgcgttgcttatcgatattatgaacacctccggctggacggcagaacagatggccgatatcaccggacgtccgagcttgatgacgaccttcacctttggcaaataccgtggcaaagcggtttccgacgttgccgaacgcgatccgggctatctgcgctggttatttaataacctggacagcatgagcccggagctgcgtttaacactgaaacattatctggaaaatacttaatccgcaggcgtagcgggtaatgttccctgcgccagcgcgaccagaaaagcatattccatcgctacgccttcgtagcttttaaagcgaccagatttaccgccatggccactgtccatgtcggtacagagcaataaaagatggtcatcggttttcagctcgcgcaatttagcgacccattttgccggttcccaatattgcacctgagaatcgtgcaaaccggtcgttaccagtaaatgcggataagcctgtgcggtgacgttgtcatacgggctgtagcttttcatgtactcgtaatattgcggatcctgcgggttaccccactcttcaaactcaccagtggtaagaggaatactttcatcaagcatcgttgttacaacatcaacaaacggtacctgggcgataacgccgtggaataattccgggcgttgattaattgcaacgcccatcaacatgccccccgcactcccgcccatcgcataacaaaggctaggagagccatagcccagttttaacaatgcatcgcaggcatcaagataatcattaaacgtatttttcttcttcagaaattttccgtcttcgtaccattgttgccccagctcaccaccgccgcgaacatggacaatggcgtagacaaagccacgatctaacaaactcaagcggctaaaactgaaatcggcatcaatacttgcgccgtaagaaccatagccatacaccagcaacgggttgtgtcctttgcgaaaatgtttgcgatggtagaccaagctaaccggaacttcgacgccatcacgggcgactatccacaggtgttcactgcggtaattcgccgcataaaaaccaggaacttccgtttgttttaatacacgacgctcaccggtatccatatccagttcaaacaaagtgtctggtgtagtcatggaagaataaccataacgcaatcgcgcggtttcaggttctggattgtaggcaatccaggtcacataggccggatcatcaaaggcaataccaatgacttcccgggtcttgcggttaatttggcgcaaactggttaacccgcgctgacgctcttcaaccaccagccagtcggtaaacagcgtaaacccttccagcatgatgttttcgcgtggcggaattaactcttcccactgttgctcatcacgcatacgggtacggtataagccaaagtttttgccgtggcggttggaacgcagataaaaacgatgctggtagtgatcaaggctgtattcgtgatctttgcggcgcggcagaaaaacaaacggctcggcatcggccatttccgcgtccagcaggcgaacttcactggtggtggcgctggccaaatgaatgactacatagtgcttgctggtcgttttatgcaggctgacgtaataggtatcgtctttttcttcgtagatcagtttatcttggcttgctggcgtaccgatggcgtgacgccagacctgataaggcagcagcgtcaccggatgcttgcgaacatagtagaaaatccaggagtcatttgcccagacaaagctgggttcaacgttatccagcagttccgggtaccagttaccagtttccagattacgaaaacgaatgccgtactggcgtcgggaaagaaaatcttctgccagcgccataatggtgttatcgggcgtaatcgccattccgcccatgctataaaactcactatgagctgcgcgcttattggcatcgagcaatgtttcccactcatcccactcttcactgaatgcgctttgacgctggtagatagcatattcacagcctggttcataaatatgccgatagcggtagccatttttgatgtagggcgcagaaacttctcgttgcggaatgcggtcgatgatttcctttaagatgcgatcctgcaaggcttgttgactggccatcacccgatgaccgtaactattttcttgttgcaggtagtccaggacttctggctgagaacgcgtatcgtcccgcagccagtagtaattatcgatgcgcgtatcgccatgaagcgtcatggcgtggggaatgcgggcggcttttggtagcatgttattgttctttctggttgaaacatcttataagggtggcaaaactcaccggggatgcaagcgaaacaggggagtcattgcttagatgatgacaggtaatggcgcggatatcgaatgttatgcagacagagaaaatcagcctgttcaaatggctgtgcgattctggatagcccgaaatagtcaacttcaggctatccagagagcggaattattccgccaaagtgcgtttttgctgttcgagatcgcgttcaatgccgtcacgaacatcctgggggattttcagcgcgtcacccagtgcattcaggtaactgcgttccataaaatggtcaatatcaatagccgcgcaactcaggaaatagatttccagcgcctcttcttcattgcggaccccggtagccaggcgttgtggatccagcggttgttcgattgcctgctcaatgagtacacgcccctgctcttccacgccggctccacgcaattgctggtcgattgccgcacgttctttggcatcaatatgaccatcacttttagcggcaaagaccagcgcaaggatcaaacgtgctgtacgctcatccagcggcgtactttgcgcgccaaactgcggttcgtcctgatgcgccgcgcgaattttatctttgtatttattccacagcaccgtacccgctaccgctccgccgccaaccagtaacgcgttggtgccatatttcgtaagaagtttacgtgcacttttatttgcgaccagcagcccagccagtccgcctaatgcgcctggcactaacagtttgaccaatccctgatccgcagagctggaggtagaagaactgctttgcccaagcagggattgcagttgatttaaccagttagccatatttgctcctcaataaccatttttagtgcctgtagcatagcggatgaggatgtcagaaaatgtatatcgagacaaaagatgcgcaaataagcggggcggtaggccgttattcaaagaaattcgcgccaggtaaggtatttactgtatatcaggtgataagggtattttaggtgaaagtagtttgtcgttttgagtggcattgtttgatgctgattgcccgatgcgacgctgttgcgtcttctcaggcctacgattgtggtgcgttctggggcggacaaggcactcgcgccgcatccgccaacagtcaatcgaattatcagaagccattaacgccgctgatattccgccattcccgctttgcagtccacgctgacctggtaatgaatatcggcacttttaccacgcacggttagcggtacactccatttatcatctttaccctgaatgtcctgcaaactgacccaagccacgggatcggcctgaccgacaattttttgatcatctgcccaacgcgccacgcgattttgttgataatcacgttttacgctcgcggcaattccggcagcatccagatcttcacactttgggaaagtgacgctcttgctggtttcattattggcagcgaaaacacttgcgcaggcagaaaccaacaacagccctaaaaacgcccctctttttttcatgtttttctccatagcacaatgattcaggagaaagcatggtacaaattgtcaggagcgcaagttgcttcaggccgcgtgactggcatcttcctcttcggattcagcaccgacgacctgtggggacggtaatttgccggttttcagaatggtgctcagcacatctttttgttctgccagccataggctaagggcttcacgttgctcgtcttccatttgcactggagaatttgtcagccaggtgtcaagcagatccgccgtatcaagcattttgtcataagcatcggcttcctttttgctggtaaagctcattttctcttcgccctcacgaatgactacgtatttaacttcaaccgccatttgcagcctctcataataactgtgattttatacagtatatttcttttcggttgagaaatcaacatcagcaataaagacacacgcaaacgttttcgtttatactgcgcgcggaattaatcaggggatattcgttatgacgttattaggcactgcgctgcgtccggcagcaactcgcgtgatgttattaggctccggtgaactgggtaaagaagtggcaatcgagtgtcagcgtctcggcgtagaggtgattgccgtcgatcgctatgccgacgcaccagccatgcatgtcgcgcatcgctcccatgtcattaatatgcttgatggtgatgcattacgccgtgtggttgaactggaaaaaccacattatatcgtgccggagatcgaagctattgccaccgatatgctgatccaacttgaagaggaaggactgaatgttgtcccctgcgctcgcgcaacgaaattaacgatgaatcgcgagggtatccgtcgcctggcggcagaagagctgcagctgcccacttccacttatcgttttgccgatagcgaaagccttttccgcgaggcggttgctgacattggctatccctgcattgtaaaaccggtgatgagctcttccggcaaggggcagacgtttattcgttctgcagagcaacttgctcaggcatggaagtacgctcagcaaggcggtcgcgccggagcgggccgcgtaattgttgaaggcgtcgttaagtttgacttcgaaattaccctgctaaccgtcagcgcggtggatggcgtccatttctgtgcaccagtaggtcatcgccaggaagatggcgactaccgtgaatcctggcaaccacagcaaatgagcccgcttgcccttgaacgtgcgcaggagattgcccgtaaagtggtgctggcactgggcggttatgggttgtttggtgtcgagctatttgtctgtggtgatgaggtgattttcagtgaggtctcccctcgtccacatgataccgggatggtgacgttaatttctcaagatctcagtgagtttgccctgcatgtacgtgccttcctcggacttccggttggcgggatccgtcagtatggtcctgcagcttctgccgttattctgccacaactgaccagtcagaatgtcacgtttgataatgtgcagaatgccgtaggcgcagatttgcagattcgtttatttggtaagccggaaattgatggcagccgtcgtctgggggtggcactggctactgcagagagtgttgttgacgccattgaacgcgcgaagcacgccgccggacaggtaaaagtacagggttaaacccggcaaaaaaacgctacaaaaatgcccgatcctcgatcgggcattttgacttttacagcttagcgccttctacagcttcacgcgccagcttagtaatgcggtcgtaatcgcccgcttccagcgcatctgccggaaccagccaggaaccaccgatgcacagcacgcttttcagcgccaggtagtcacggtagttagccggagaaataccacccgtcgggcagaaacggacctgggagaacggacccgcgatcgcctgcagggctttcacgccgccgttagcttcagccgggaagaatttgaactctttcaaaccgtagtccatacccagcatcagttcggaaacagtgctgatccccggaatcagaggaatagtcccttcggtagcagctttcagcagcggctcggtcagacccgggctaattgcgaactgtgcacccgcttcagtgacttctgccagctgctgtggattcagcaccgtaccggcacccacaatcgcttcaggcacttctttggcgatagcacggatagcgtcaactgcacactcggtacgcagagtcacttccagaacgcgcaccccaccagcaaccaacgcttttgccatcggcaccgcgtgttccagtttttttaccacgataaccggtacaaccgggccggtggtcaggatactttctgcacttgttttccagtttttcatcagagttttctctcgcctgattacaaatttgtcgtcttaaaaagtgatacaggttgcgccctgttcggcaccggacagtttttcacgcaaggcgctgaataattcacgtcctgttcccacgcgactcgcgctcaggtcaggaatgtgcggttcgcgagcagccagttccgcttcgtctaccagcagcgtcagttcgcctgtctgtccattcacacgaatgatgtccccgtcgcgcacttttgccagcagcccgccatcgtaggcttctggtgttacgtggatagcactcggcactttaccactagcgccggagagtcgtccatcggtaactaacgcaattttgaaacaccggtccaataatacaccaagtggcggcatgagtttatgtaattctggcattccgttcgcttttggcccctgatgacggacaacaacgacacaatcgcggtccagcaaacccgcttcaaaggccggcataacgtcatgctggctttcaaaaacaaccgctggcgcttcaatcacctggttctcaaccggcacggcagaggttttcataaccgcacggcccaggttaccgcttaacacttttgtcccaccatgatgagagaaaggttgttcgaaggaagcgatcacattgctgtcgagacttttttccgccccttcccgccagtccagttcaccattattcagccatggttcaagggtataacgagacagaccaaaacctgccaccgtattgacatcttcatgcagcaggcctgctttgagcagttcacgcaccagaaccggtacgccacctgccgcctggaagtggttaatatcggccggaccgttcgggtagagacgtgccatcagcggtacaacatcagaaaggtcagagaagtcatcccagttaatctgaataccggccgcgcgcgccatcgccaccaggtgcatggtgtggttagtggaaccaccggtcgccagcagtgcaacgataccgttcaccaccactttctcatcgatcatcttaccgatcggcatccattcattaccattaccggtcatgcgtgtaacctgacgcgcagctgcggcggtcaaagcatcgcgcagcggagaatccggatgaacaaaagaagagcctggcaactgcatccccataaactccaccaccatctggttggtgttggcagtaccgtagaaagtacatgttcccggcgcatggtaagacgcggcttcactctccagtaaggccatgcggtccactttaccttcggcataaagctggcgaatacgcactttttctttatttggcaaaccgcttgccatcggtccagacggcacaaacaccgcaggcaaatgaccaaagctcagggctgccatcgtcagacccgggacaatcttgtcgcacacaccgaggaacagagcaccatcaaacatgttatgggacagccccaccgccgcagacatcgctatcacttcgcggcttagcaggctcaattccattccatcctgcccctgggtgacaccatcacacatcgccggaacaccgcccgcaacctgaccaaccgcattcgcttcatgcagggctttacgaatgatttctggatagtgttcataaggctggtgcgcggagagcatgtcgttataggaggtgatgatggcgatattgttacgcaacatgcttttcaaagaggctttgtcttctggctggcaggcagcgaaaccgtgtgccaggttaccgcatgccaactggctacgatgaacggtgctagttttcgcttgttctatccgggcgagataagcagagcgagtctcgcggctacgttcaatgattcgatttgttacgcgtaacaattgtggattcataaaggctcctgaaattgagttgtcagagcaggatgattcacaacgcgtttcattcagaggatttatgactgaaacgcctgtaaccggagctcatagggcaaaaacgtttcagtcagtgtaataaaaaaagcctcgtgggtgaatccgcacgaggcctgaaagtgtaaaaattgttctacaatctgcgcaagatcatgttaccggtaaaataaccataaaggataagcgcagatattactcaaactcattccaggaacgaccatcacgggtaatcatcgccacgctggcaacgggtccccaggttccggcctgatacggtttcggcgcatcattgtccatcgcccacgcctcagtaatggagtctacccatttccaggcttcttccacttcgtcgcgacgtacaaacagtgcctgaataccacgcatggtttccagcagcaaacgttcataggcatccgccagatgcgtctgattaaaggtttcactatagctcagatccagcttggtgatttgcaggttatgtttgtggtcaaggccaggaactttattcagtacctggatatccacgccttcatcaggttgcagacggatagtcagtttattctgcggcagatcctgccagctttctttaaacagattcagttcaggtgttttgaaatagaccacgacttcagaacatttggtcggcagacgtttaccagtacgcaggtagaatggcacaccggcccagcgccagttatcaatgtcgacgcggatcgccacgaaagtttctgtattgctgctcttgttcgcgccctcttcttccagatatcccggcacttttttgccctgggcgaagcccgcagtatattgcccgcgtacggttttttcgcgtacgttggagcggtcgatgcggcgcagagacttcagtactttcactttttcatcgcggatgctgtctgcgctcaggtcagacggcggagacatcgcaatcatgcaaagaatttgcagcaggtggttctggatcatgtcgcgcatctgaccggctttatcaaaatagccccagcgcccttcgatccccacttcttctgccacggtaatctcaacatgatcaatggtgcgattgtcccagttattcacaaacagggagttagcaaaacgcagcgccaacaggttcagcaccgtttctttaccaagatagtggtcgatacggtaaacctggcactcctcgaagtattcgccaacctgatcattgatttcctggctggtcgccaggctcgtccccagcggtttctccatgactacgcgtgccggtttagcattcagttttgcctcgccaagccctttgcaaattgcgccaaaagtgctgggcggcatggcaaagtagttaatggtgatacgatttttttgatccagcatcgcgccgagacggctgaatgcagcagtgtcattgacatcgagattacaaaaatccagacgtgcactcagggtgtcccataaaccttcatcaatggtttctttcatgaaagtttcgagcgcctcgcggacaactttggtatatgccgctttatcccagtcagcacgccctacgccgataatccgggtgtccgggttgagctgaccggctttttccagttgatacagggaaggcagcaatttacgacgcgcaaggtcgcctttcgcgccgaaaatgaccaggtcacaggcctgggctgtttgcgttaccgccatgtcattctccttaagttaactaacccggtacttaagccagggtatacttgtaattttcttacggtgcactgtactgcttttacgagcttgcgaaaactgtaaacgcttatccacccgtgcgattacgggaaaagcgcgcaaagtgcggcaaaactgataaaaaaatcatcgttttccattgggtaaaaatctgacactgatcatgttatgaaaaaaaataacaacttttttatctgcttttgtcattaacacggcacacaggcgtaatatctgacaaaactgcatttcgatttctttcagtgcggaaatcgtcattacccgtgagtctctttacatcatgaatatgctggaaaaaatccagtctcagctggaacatttgagcaaaagtgagcgcaaagttgccgaggtcattctggctagccccgataacgcgatccatagcagtattgctgctatggcactggaagccaatgttagcgaaccgacggtgaatcgtttctgtcgcagcatggacacgcgcggttttcctgattttaaacttcatctggcacagagtctggcgaatggcactccctatgttaatcgcaatgtcaatgaagatgacagcgttgaaagttacacagggaaaatatttgagtccgcaatggcaacgcttgatcatgtccgtcatagtctggataaatctgccatcaaccgcgccgtcgacttgctcactcaggcaaaaaaaatcgcctttttcggattaggctctagtgccgccgttgcccacgatgcgatgaataagttctttcgttttaatgttccggtggtgtactccgatgatatcgtgctgcaacgcatgagttgtatgaattgtagcgacggagacgtggtggtgctgatttctcacactggaagaacaaaaaatctggtcgagctggcgcagctggcacgcgaaaacgacgccatggtgattgccctcacctctgcgggtaccccgctcgcccgggaagcaacgctggcaattaccctcgacgtaccggaagatactgacatttatatgcccatggtttctcgacttgcacagctgaccgtgatagatgtgctggcgacaggatttactttgcgacgcggtgcaaaattcagagataacttgaagcgggtcaaagaagcgctgaaggaaagccgttttgataagcagttacttaatttaagtgacgatcgctaaaaacgactgtcactgtcctaatcttatacgacatccgaatgagattaatttatcgccatcgcggcgttatttcattcggatttcatgttcaagcaacacctggttgtttcagtcaacggagtattacatgtccagaaggcttcgcagaacaaaaatcgttaccacgttaggcccagcaacagatcgcgataataatcttgaaaaagttatcgcggcgggtgccaacgttgtacgtatgaacttttctcacggcagccctgaagatcacaaaatgcgcgcggataaagttcgtgagattgccgcaaaactggggcgtcatgtggctattctgggtgacctccaggggcccaaaatccgtgtatccacctttaaagaaggcaaagttttcctcaatattggggataaattcctgctcgacgccaacctgggtaaaggtgaaggcgacaaagaaaaagtcggtatcgactacaaaggcctgcctgctgacgtcgtgcctggtgacatcctgctgctggacgatggtcgcgtccagttaaaagtactggaagttcagggcatgaaagtgttcaccgaagtcaccgtcggtggtcccctctccaacaataaaggtatcaacaaacttggcggcggtttgagcgctgaagcgctgaccgaaaaagacaaagcagacattaagactgcggcgttgattggcgtagattacctggctgtctccttcccacgctgtggcgaagatctgaactatgcccgtcgcctggcacgcgatgcaggatgtgatgcgaaaattgttgccaaggttgaacgtgcggaagccgtttgcagccaggatgcaatggatgacatcatcctcgcctctgacgtggtaatggttgcacgtggcgacctcggtgtggaaattggcgacccggaactggtcggcattcagaaagcgttgatccgtcgtgcgcgtcagctaaaccgagcggtaatcacggcgacccagatgatggagagtatgattactaacccgatgccgacgcgtgcagaagtcatggacgtagcaaacgccgttctggatggtactgacgctgtgatgctgtctgcagaaactgccgctgggcagtatccgagtgaaaccgttgcagccatggcgcgcgtttgcctgggtgcggaaaaaatcccgagcatcaacgtttctaaacaccgtctggacgttcagttcgacaatgtggaagaagctattgccatgagtgcaatgtacgcagctaaccacctgaaaggcgttacggcgatcatcaccatgaccgaaagcggtcgtaccgcgctgatgacctcccgtatcagctctggtctgccaattttcgccatgagccgccatgaacgtacgctgaacctgactgctctctatcgtggcgttacgccggtgcactttgatagcgctaatgacggcgtagcagctgccagcgaagcggttaatctgctgcgcgataaaggttacttgatgtctggtgacctggtgattgtcacccagggcgacgtgatgagtaccgtgggttctactaataccacgcgtattttaacggtagagtaagtacgttgccggatgcggcgaaaacgccacatccggcctacagttcaatgatagttcaacagatttcgaatattctgaagcaaacttgaacttatcatcaggcgaaggcctctcctcgcgagaggcttttttatttgatgggataaagatctttgcgcttatacggctggatttcgcccggtttgcgagttttcagcaattttagtatccaggtgtattgttctggtcgcggaccaacaaaaatctcgacttcttcattcatccgccgcgcaatcgtatgatcatccgcctctaacagatcatccatcggtgggcgcacctgaatcgtcagacgatgcgtcttgccatcataaatcggaaacagcggtacaacgcgcgcacggcacactttcatcaaacgaccaatcgcgggcaacgtcgctttataggtggcaaagaaatccacaaattcgctgtgctctgggccatgatcctgatcgggtaaataatatccccagtacccctgacgtacgctctggatgaatggtttaataccgtcatttctcgcatgcagacgaccgccaaagcgacgacgcaccgtgttccagacataatcaaaaaccgggttgccctgattatggaacatcgctgccattttctgcccttggctggccatcagcatggcaggaatatcgacggcccaaccgtgcggcaccagaaagataactttctcgttattacgccgcatctcttcgatgatctccagcccttgccagtcaacgcgcggctgaattttctccggcccgcgtattgccaactcagccatcattgccatcgcttgcggcgcggtggcaaacatctcatcaacaatcgcttcgcgttcagcttcactacgttctggaaagcagaggctcagattgattaacgcacgacggcgactgctttttcccagtcgtccggcaaaacgtcccagccgtgccagaatgggatcacggaactttggcggcgttaaagcgatacccgccatcgctgctacgcccagccatgctccccagtagcgcgggtggcgaaaggatttatcaaactcaggaatgtattcgctattattttttttcgtttccatgcttttccagtttcggataaggcaaaaatcaatctggtgatagtgtagcggcgcaacttgccccgcaccaaataaaaaaagccggtactgactgcgtaccggctgcgaatggatgttaattaatcaaaccgtagctgcggcacaatctctttggcctgcgccaggaattcgcgacgatcggagccggtcagcccttcggtacgcggcagttttgccgtcagcgggtttacggcctgctggtttatccatacttcatagtgcagatgcggcccggtactacgtccggtattaccggaaagcgcgatacggtcgccacgtttcaccttctgtcccggtttcaccagaatcttgcgcaagtgcatataacgcgtggtgtagctgcgaccatgacgaatagccacataataacctgctgcgccactgcgtttggcaaccaccacttcaccgtcacccacactaagcactggcgtaccctgcggcatggcgaaatcaacacctctgtgtggtgcaacgcgaccggtcaccggattagtacgacgcgggttaaaattagagctgatacggaactgtttcgccgtcgggaatcgcaagaatcctttcgccagaccagtaccgttacgatcgtagaatttgccatcttcagcgcggatagcgtaataatctttaccttcactacgcaaacgtacgcccagcagctggctttgctcacgtttaccatcaagcatttctcgagacattaacaccgcaaattcatcgccttttttcagtttgcggaaatccatttgccactgcatggctttaatcactgcgctcacttcggcgctggttaaaccggcgtttctggcgctggcaacaaagcttcccccgacggtacctttcagcagattgttaacccactctccttgctgcatttcgctggtcattttaaaaccgttagcggcagtacggtcataggttcgggtttcacgacgagacacttcccaggtgaggcgctgcagttcgccgtccgcggttaatgtccaggagagttgttgaccgattttcaggttacgcaattctttgtcggccgcagccagttgggtgatatcacccatatcaataccatactgattgagaatgctgcttagcgtatcgccagtggaaacaacatattcatgcacgcccgcttcaccggcgattttgtcatccagttcgtcctggggaatggcttcatcttcttgtgcagcttgatcaatcggctcactggcttcaggtaagaggctacgaatttcgttctgttccagctcaatggttttgacaattggcgtggcatcacggtgataaacataaggccgccagacagcgacggccagagtaagaacggtgaggctccccaacataacgcggtgtggtcgcggtaaattattaaacgccagggcgacagagcgggctatctgttgcacgtaatcacttcctcattaatctcctttcaggcagctcgcatactggttggctaattgactcaggaattcactatagcttgttttacccagtttgatattcgtccccaggggatccaacgttcccatacgaacggatgtccctcgtgcgacgctctcaacgaccgctggcctgaactgtggctcagcaaaaacgcaggttgctttttgctcaaccaactgtgttcttatttcatgtaaacgctgcgcgccaggttgaatctcagggttaacggtaaaatgaccaagcggtgtcagtccaaactgtttttcgaaatagccgtaagcatcgtgaaaaacgaaataacctttccccttgagcggcgcgagctcgttaccaacctgcgtttcggtactggctaattgtgcctcaaaatccttcaggttggcgtcaagtttggctcgactttgcggcataagttccactaattttccatggattgcaaccgctgtagcccgcgctatctctggggaaagccaaagatgcatgttgaaatcgccgtgatggtgatcttcgtcacttttttccgcgtggtcgtgatcatcatcatcgccgtgaatacttttcatcagtagcggtttcacatcttcaagctgcgcaatcgttacctgcttcgctcctggtaatttgcttaccggtttttgcataaacgcttccatctccgggccaacccaaacgactaagtccgcgttctgtaagcgttttacatcgcttgggcgcagactataatcatgttcactagcgccgtcaggaagtaaaacctctgtttctgttaccccatcagcaatggcagaagcgatgaacccaacgggtttaaggctagcgacaacggcggcatctgcggcctgtgttgcacctccccagagagcggcggataatgctgcgaaaagaagcgtttttttatgtaacataatgcgaccaataatcgtaatgaatatgagaagtgtgatattataacatttcatgactactgcaagactaaaattaacatgacaagtctggtttccctggaaaatgtcagcgtttcttttggccaacgccgcgtcctctctgatgtgagcctggaacttaaacctggaaaaattttgactttacttgggccaaatggcgcaggtaagagcacactggtacgggtagtgctcgggctggtaacacccgatgaaggggttatcaagcgcaacggaaaactgcgcatcggctatgtaccgcagaagctgtatctcgacaccacgttgccactgaccgtaaaccgttttttacgcttacgccctggtacacataaagaagatattttgcctgcactgaaacgtgtccaggccgggcacctgattaacgcaccgatgcaaaagctctctggtggcgaaacgcagcgtgtactattagcgcgagcattgttaaatcgcccgcaattattagtgctggatgaacccactcaaggcgtggatgtaaatggccaggtggcgttatatgaccttattgaccaactgcgtcgtgaactggattgtggcgttttaatggtttctcacgatctgcatctggtgatggcaaaaaccgatgaagtgctgtgcctgaatcaccacatttgttgttccggcacaccggaagttgtttccctgcatccggagtttattagtatgtttggtcctcgtggtgctgaacaactgggtatctatcgccatcatcataaccatcgtcacgatttacagggacgaattgttttgcgtcggggaaatgatcgcagttgatttaacgtcggggaaatgatcgctcatgattgaattattatttcccggttggttagccgggatcatgctcgcctgtgccgcgggtccgctgggtagctttgtagtctggcgtcgtatgtcttatttcggtgatacgctggctcatgccagtttacttggcgtcgcgtttggtttgttgctggacgtgaatccattctatgcggtgattgccgttacgctgctgctggcgggcggtctggtatggctggagaagcgtccacagctggcgatcgacacgttattagggattatggcgcacagtgccctgagcctgggcctggtggtcgtgagtctgatgtctaatattcgtgttgatttgatggcttacctgttcggtgatttgctggcagtgacgccagaagatctcatctctattgcgattggcgtggtcatcgtggtggctattttgttctggcaatggcgcaatttgctgagtatgacgataagcccggatctggcgtttgttgatggtgtgaaattacagcgagtgaaattgttgttgatgctggtgacggcattgacgattggtgtagcgatgaaatttgtcggtgcgttgattattactagcttgctgattattcctgctactactgcgcgtcgctttgcccgcacgccggaacagatggctggtgtcgctgttttggtggggatggtggcagtgactggcggtttaaccttttccgcggtttacgatacgccggcgggtccgagcgtggtgctatgtgcggcactgttatttattctcagtatgatgaaaaagcaggccagctaatctatcgctgaacacatttgtcggatgcggcgcgagcgccttatccgacctacggttcggtatctctggtagtcctggtaagacgcgaacagcgtcgcatcaggcatattgccagtgccggatgcggcgcgagcgaccaatccgacttacggcatttctggcggcgttatgccaaagtgattccacgcccgcgtcgtcgccatacgcccacgcggtgtacgctgcaaaaagccttgctgaatcaaataaggttccagcacatcctcaatggtttcacgttcttcgccaatggctgccgccaggttatccagacctacaggtccaccaaagaacttatcgattaccgccagcaacaatttgcggtccatataatcgaaaccttcagcatcgacattcaacatatccagcgcctgagcagcgatatctgcgctgatggtgccatcgtgcttcacttcggcgaaatcacgcactcgacgcagcagacggttggcaatgcgcggcgtaccgcgagcgcgacgagcaacttccagcgcgccgtcatcactcatctcaagccccataaagcgtgcgctgcgactgacgatatattgcagatccggcacctgataaaactccagacgttgcacaataccaaaacggtcgcgcaacggacttgtcaggctacctgcgcgcgtggttgcaccaatcagggtaaacggcggcaaatcaattttaatggagcgtgccgccggaccttcaccaatcatgatatccagttggtagtcttccattgccgggtacagcacttcttcaacaactgggcttagacggtggatctcatcaataaacagcacgtcatgcggttcaaggttagtgagcatcgcagccaaatcgcccgccttttccagcaccggaccagaagtcgtgcgtaaattaacgcccatttcattggcgacaatgttggcaagcgtagttttacccaaccccggaggaccaaaaatcaacaaatgatcgagggcatcgccgcgcagtttcgctgctttgatgaaaatctccatctgactacgaacctgcggctgaccaacatactcttccagtaatttggggcgaatggcgcgatctgctacatcttccggcaaagtggtaccggcagaaatcagacggtctgcttcaatcatcctttacctcataacgcggcgcgtagggcttcgcgaattaaagtttcactgctggcgtcagggcgagcgattttgctcaccatgcggcttgcttcttgtggtttatagcccagcgccaccagcgcggcaaccgcttcttgttcagcatcgtcggtcgccgggctggcaggagacgtgagtaccaggtcggcggctggcgtaaagagatcgccatgcaaacctttaaatcggtctttcatttcaacaatcaagcgttcggcggtttttttgccaatacccggcagtttcaccagtgcccccacttcttcacgctcaacggcattaacgaactgctgcgcactcattccggagaggatcgccagcgccaacttcgggccgacgccgttggttttgatcaactctttgaacaatgtgcgctcttgtttattgttaaaaccgtacagcagttgcgcgtcttcacgcaccacaaagtgggtgaaaacgatcgcttcctgacccgcttcagggagttcataaaaacaggtcatcggcatatgcacttcatagcctacgccgcccacttcaattaacaccagcgggggttgtttttcaatgatgatgcctctgagtctgcctatcacatgacgctcctgcgtaatgaatcaaagataatgctgtatgataaaaaaatgctggatagatatccagcgaaggatgaagaaaacttgcgaggtgtctcgatgaactgaaaaatggcacagtataatttattctacaggttatattggaagcaaatattttaatattacatattcagtgaagaaatgcgtaataaaaatatacattgcgcctcctgaaaaaataaattttttatgctattacgtatatttgtatctatttcaatggaatgacaacgtgaatattaattaccctgctgaatatgaaattggagatatcgtctttacatgtataggtgctgccttatttggtcaaataagtgctgcaagtaattgctggagtaatcacgtcgggatcattatcggtcataacggtgaagacttcctggttgcagaaagccgggttccccttagtaccatcaccacgctatctcgttttattaaacgtagctctaatcaacgctatgctataaagcgattagacgctgggctgacagaacgacaaaaacaacgaattgttgaacaggttccctcccggctacgcaaactttaccacaccggttttaaatacgaatctagccgccagttctgtagtaaatttgtttttgatatttataaagaagcgctatgtattccggtgggtgaaatagagacgtttggagaattgttaaatagcaatccgaatgcaaaactcactttctggaaattctggttcctgggttctattccgtgggagcgtaaaaccgtcacgccagccagtttgtggcatcatccgggtttggtgttgattcatgcggagggagtggaaacgcctcagccggaactgaccgaggcggtataacttaacgcagtcgccctctcgccaggttcagccggctttcgctcatctgcatcgcattctgactaacgtggcagtgggtgatagcaatcgccagcgcatcggcggcatccgcctgtggattagcgggcagtttcagcaaggtgcggaccatatgctgcacctggcttttttcggcactgccaatacctaccaccgtttgctttacctgacgtgccgcgtattcaaatactggcaactcctgattcaccgccgccacaatcgccacgccgcgcgcctggcccagtttcagggcactgtcagcgttctttgccataaagacttgttcaatggcgaaataatcaggctggaactgggtgatgatttccgtcacgcccgcatagatgagtttcagacgagacggtaaatcatccactttggtgtggatgcatccgctacccaggtaggacagttgcctacctacctggcggatgacgccgtagccggtcacgcggctacccggatcaatgccgagaataatagccatcacgcgtctccgttttgctgtttagcaggcctcatcagagagtcgctgcgacctcatcagagatttcaccgttatggtaaacttcctgcacgtcgtcgcaatcttccagcatatcgatcagacgcatcagtttcggtgcggtttctgcatccatatcagctttggtagacgggatcatggaaacttccgcgctgtctgctttcagacctgccgcttccagagcgtcgcgcactttacccatttcttcccatgcagtgtagacatcaatcgcgccgtcatcataggtcacaacgtcttcagcacctgcttccagtgctgcttccatgatggtgtcttcatcgcctttctcgaaggagatcacgccttttttgctgaacagataggcaacggaaccatcagtaccgaggttaccgccacatttgctaaatgcatgacgcacttcagcaacggtacggttgcggttgtcagacagacattcaatcatgattgccgtgccgccaggaccgtaaccttcgtagatgatggtttccatgtttgcatcatcatcaccgcccacaccacgtgcaattgcgcggttcagtgtgtcacgggtcatgttgttagacagtgctttatccaccgccgcacgcagacgcgggttagcgtccggatcgccaccgcccagcttagccgcggttaccagctcacgaatgattttagtgaagattttaccgcgcttagcatcctgcgcagctttacgatgtctggtgttggcccatttactatgacctgccataaaaatatctccagatagccctgcctgttcaggcagcgttaattacaaactgttcaatcgcctgccggttgctccaggacttagtgagcgccgccgcagcaggcgcatcaagccacttgtaagccagatgttcagtgaaaacgatctgccgctcgtgcggaagcgcaagacagaaccaactttccgtattacgcgtcacgcccggcgcatagcgatgacgtaaatgactaaaaatttcaaactctaccgtgcgctgacagtcaattaaggtcagttgttcagcgacaacatcaatggtgacctcttcctttacttcgcgcatggcagcttgcggcgcggtttcaccctcttccacgctgccggttacgctctgccagaaatcgggatcgtcacgccgctgcaacatcagcacccgtttcgtatcttgtgcgtagatgaccactaagatgctaacgggacgcttatacactttatccttcacgctgcctcttcgttgactgccttcgctcatcccattcacatagttatctatgctcatgggagttcactcagttgccgcctcgatgcaacgcgaatgatttcgtgtatttgagtcatatcagttattctcagccttcttcacaacctgaatgctcagctcagccagtgcagtcgggttagcaaagctcggtgcttcagtcatcagacacgctgccgccgtggttttcgggaaggcgataacgtcacggatattgtcggtgccggtcagcagcatggtcagacggtcaagaccgaatgccagacctgcgtgcggcggagtaccgtatttcagagcgtcgagcaggaagccgaatttctcgcgctgttcctcttcgttgatacccagaataccaaacaccgtctgctgcatatcaccattatggatacgtacactaccaccgcccacttcgtaaccattgatgaccatatcgtaagcgttcgccaccgcattttccggtgcagctttcagttctgcagccgtcatatctttcggactggtgaacggatggtgcattgccgtcaggccgccttcaccgtcgtcttcaaacatcgggaagtcgataacccacagcggtgcccatttgctttcgtcggtcagaccaaggtctttacccactttcaggcgcagtgcacccatcgcgtcggcaacaattttcttgttgtcggcaccgaagaaaatcatatcgccatcttgcgcggcagtacgatccaggatgtcttcgatgatttctgcattaaggaacttcgctaccgggctgttgataccttccagacctttcgcgcgttcgttaactttgatgtaagccagacctttcgcgccgtagattttaacgaagttaccgtattcgtcgatctgcttacgggtcaggcttgcgccgcccggaacgcgcagagccgctacgcgacctttcggatcgttcgccggacctgcaaatacagcaaactcaacagatttcagcagatcagcaacgtcagtcagttccatcgggttacgcagatccggtttatcagaaccataacggcgttctgcttccgcaaaggtcattaccgggaaatcgcccagatccacacccttcacttccagccacagatgacgcaccagcgcttccatcacttcacgcacttgcggcgcggtcatgaaagaagtttccacatcgatctgagtaaattcaggctgacggtcagcacgcaggtcttcgtcacggaagcatttaacgatctgatagtaacggtcaaaaccggacatcatcagcagctgtttgaacaactgcggggattgcggcagtgcgtagaatttacctttgtgcacacgagaaggcaccaggtagtcacgcgcgccttccggcgtggctttggtcagcatcggagtttcgatgtcgaggaagccgtggtcatccataaaacggcgcaccaggctggtgattttagcgcgggttttcaggcgctgagccatttccggacgacgcaggtcgaggtagcggtatttcagacgcgcttcttcggtgttgacgtggttagagtcaagcggcagaacatctgcgcggttgatgatagtcaggctggacgccagcacttcgatttcgccggtcgccatatcgcggttaatatttttttcgtcacgcgcacgtacggtgcccgtgacctgaatgcagaactcattacgcagttcagaggccagctttaacgcgtccgcacgatccggatcgaaaaatacctgcacgataccttcgcggtcgcgcatatcgatgaagatcaggctaccaagatcacgacgacggttgacccaaccacacagagtcacctgctgccccacgtgggacaaacggagctgtccacaatattctgtacgcatgagatatcccttaacttagctgccggcggatgccccctgctgcgcaggtgaccaagtcgcagcgttagctgtatgtcacaactgaatgaaaaaaggcggctattatactggaaattctgccgcaccgtaagagcctggcccgcgctggaacgcctcgttaccactttatatcgggcctgaaatcagactctacgccagtttgctataaaggtgttgcccgaactcataaaaattaacaaaatttgtcgttccgccatcggctaatcgcattaaggtgtgaggcacgattttgttttttcaggagtcattatgcttgaacttaatgctaaaaccactgcgctggtggtgatcgatttacaagaaggcatcttaccttttgccggtggtccacatactgccgatgaggtagttaatcgcgccgggaagctggcggcgaaatttcgcgccagcggtcagcccgtgtttctggtgcgcgttggctggtctgccgattacgctgaagcattaaaacagccggtcgatgcgcccagtccggctaaagtgttgcccgaaaattggtggcaacatcctgctgcattaggtgcaaccgacagcgatatcgaaatcatcaaacgtcaatggggtgcgttttacggtacggatctggagttgcaattacgccgccgaggtatcgatacaatagtgttatgtgggatcagcaccaatatcggtgttgaatccaccgcccgcaatgcctgggaacttggctttaatctggtgattgccgaagacgcctgtagtgccgccagcgccgagcagcacaataacagtatcaaccatatctacccgcgcatcgcccgtgtgcgtagcgtggaagagatcctcaacgcgttatgatttacatcggtctaccgcaatggagccatcctaaatgggtgcggttggggatcaccagccttgaagagtatgcccgccactttaactgcgtggagggcaacaccacgctttacgccctgccgaaacccgaggttgtcctgcgctggcgtgagcagaccacagatgacttccgcttctgttttaagtttccggcgaccattagccatcaggcagcattacggcattgcgatgatttagtgactgaatttttgacccgcatgagtccgttggctccgcgcattgggcaatactggctgcaactgcctgccacattcggcccacgggagctgcctgcgctttggcattttctcgattctcttcctggcgaatttaattatggcgtggaagtccgccatccacagtttttcgccaaaggagaagaggaacaaacgcttaatcgcggtttacatcagcgcggcgttaatcgggtgattttagacagccgcccggttcatgcagcacgtccacacagtgaagctattcgcgacgctcaacgaaaaaaacctaaagttccggtacatgctgtactgacggcgacaaatccgctgatccgttttatcggtagtgatgatatgacgcaaaaccgggaattatttcaggtctggttacaaaaattagcgcagtggcatcagaccactacgccttatctttttttacatacgccagacattgcccaggcaccggaactggtacataccctgtgggaagacttacgtaaaacgcttccagagatcggagcagttccggctattccacagcaatcttctcttttctgaatttgccacctatcatagacaggtgccatcggccattttaaagggagtttgtatggtaagcgcgctgtacgccgttttaagtgcgttgttattaatgaagttctcttttgatgtcgttcgcctgcgaatgcagtaccgcgttgcctatggcgacggcggttttagcgaactgcaaagcgctattcgcattcatggtaacgcggtggaatatattcccatcgcgattgtgctgatgctgtttatggaaatgaatggcgcagaaacctggatggtgcatatttgcggcatcgttttgcttgctggtcgtctgatgcattattacggttttcatcaccgtctgttccgctggcgacgttccggcatgagcgccacctggtgtgcgctgttgctgatggtgctggcgaatctttggtatatgccctgggagttggttttctccctgcgttaacgcacaatacgccactttctttttcccggatttttacgttatgtctcaccgcgacacgctattttctgcccctatcgccagactgggcgactggacctttgatgaacgggtagctgaagtcttcccggatatgatccagcgttccgtacccggctattccaatattatttccatgattggtatgttagccgagcgcttcgttcaacctggtacgcaggtttacgatctgggttgtcctctgggcgcggcgacgctcagcgtgcgtcgcaacattcatcatgataattgcaaaattattgccatcgacaactccccggcgatgattgaacgctgccgtcgtcatattgacgcctataaagcccctacgccagtagacgtcattgaaggtgatattcgcgatatcgccattgaaaacgcaagcatggtggtgctgaattttaccctgcaattcctggaaccttccgagcgccaggcgttactggataaaatttatcaagggctgaaccccggcggcgcgctggtgcttagcgaaaaattcagtttcgaagatgccaaagttggtgaactgttgttcaacatgcaccacgactttaaacgtgccaacggttacagcgaactggagatcagccagaagcgcagcatgctggaaaacgtgatgctgaccgattccgtggaaacccataaagcacgcctgcataacgccggttttgagcatagtgagctgtggttccagtgctttaactttggtagtctggtggcattaaaagcagaggacgctgcatgatcgactttggtaacttttattctctgattgccaaaaatcatcttagtcactggctcgaaacgctgcccgcgcagattgctaactggcagcgcgagcagcagcacgggttgtttaagcagtggagtaatgcggtggagtttctacctgaaattaaaccgtatcgtcttgatttattgcatagcgttacggcagaaagcgaagagccactgagcgcagggcaaattaaacgcattgaaacgctgatgcgcaacctgatgccgtggcgcaaagggccgttcagtctgtatggcgtcaacatcgataccgaatggcgttccgactggaaatgggatcgtgttctgccccatctttctgatttaaccggacgcaccattctggatgtcggctgcggcagcggttatcacatgtggcgcatgattggcgcaggcgcgcacctcgcggtggggatcgaccctacgcaactgtttctgtgccagtttgaagcggtgcgtaaactactgggtaatgatcagcgcgcgcatttgttaccgttaggtattgaacaacttccggcactgaaagcctttgataccgtctttagcatgggcgtgctttaccatcgccgtagtccgctggagcatctatggcagttgaaagatcaactggtcaatgaaggtgaactggtgctggaaacgctggttattgatggtgatgagaacacggtgctggtaccaggcgatcgttacgcgcaaatgcgtaatgtctatttcatcccttccgcgctggcgctgaaaaactggctgaagaagtgtggttttgtagatatccgcattgcggatgtgagcgttaccaccacagaagagcagcgacgcaccgaatggatggttaccgaaagcctggccgatttcctcgacccacatgatccgggtaaaacggtggaaggttatccggcacctaaacgcgcggtgctgattgcgcgcaagccgtaaaggtctggtattactgccggatgcggcgtgaacgccttatccggcctacaaaaccttgctaattcaatatattgcagggactatgtaggcctgataagcatagcgcatcaggcagctttacgtttgcataacctcagcgcccgtttccgggcgctattcacgtcttacgcctgaacagctggctgatcaaacgccgttaacttcggtgcattgcccgtatatttttcgatatacaccaacgcactgttaccggcacaggcatttgccagctggctgctggggatatccgccgttaacacgttcgcactgccgtttttacacaagccattttccagatctggccatgcaccttcatgcacgcataccacgccttttttgatcccgtcagtcaccaccgcgcctgtcaaaatctgaccacgtttgttccagacacgcaccagatcgccattcgcaataccaaagcgtgcagcatcttcggtgtgaatagtgattggttcacgatcggcgatcgcatattttttacgcagttccgcatagttaagctgactgtgtaaacggtgtgccggatgtgcggtcagaagctgtaactgcttctcgtcggcggtacctttccattcatcaggagccagccaggttgggtgtgccgggcaatccttatagccaaatttttccaacgttttactatagatttcaattttgccgcttggcgtacccagcgcatttttcaccggatcggcgcggaaatcaccataacgaacgtactgttcgttcttctcgctgtggcgcatttcgatcagtttattttgctgccagaaggcattaaacattggcatagtgacgcgttgcgcacgggcacctttctgagcggcatcatagaaaaatttcagccacgccatttcatctttaccttcggtatagatctcttttccgccaggtttgagtaattccgcaagatcggcaaacacgtcaaaatcgttacgcgcttcaaattgcggagcaacagcctgcttcatcggcacaatatgctggttgctgtaatcaccggtcatcgtcaagtcattgcgctcaaagcttgtggtgatcggtaatacgatatctgcgtgtttggctgctgcggtccagtagcattcagaaacgacgatcatctccggtttctgccatgctttaatcagacgattagtatcctggtgatgggtaaagttaccgccacccgcccaccagatcattttgatattcggatacgtttgttctttaccgttatgctgatatttgccgccaggattttccagcgcatcgacgatacgggcaacaggaatcgccgtcattccgccatcatcagcggcctcgctggcatgtccggcaatcgccgcagacatttccggcagcacgccgccaacacgcgtcgggttgccaccgttggagtaatgataagagaaaccaaaaccgccgcccggtgtaccaatctgccctaacatcgccgccagcgtcaccagcatccagtgtttctgttcaccatattgctggcgctgaattccccagcctgccatcagcattgtgcgattcgccgccatcagttcagcgagtttgactatctgcgcttccggtacgccagtaatttccgccgcccagaccgcgctcttcggcgtattatcgctcttacctgtcagatactcttcaaactgcggatacccggtagtgtatttttcaaggaacactttatcgtgtttgccttgtgtcatcagggtatgcgcaatccctaacatcagtgccacgtcggtgcccatattcggcgcgatccaggtggcattatcgtcaaagaattcgatggtttcggagcggataggatcaatggcaatcactggtttgccagattttttcagctgatggaagtattccagcccttgctcatcggtactgctccaggcaatttttaaggtattcagcgggttcattccccacagcaccacaacctggctgttttccagaatcagcggccaggaggtctgctgttcatacacctctacagaaccgaccacatgcggcatgatcacctgtgctgccccggtactataatcgccgctatgcccggaataaccgcccgccaggttcatataacgttgcagtaaggtttgcgctttatgcaacacgccagaagagcgccagccgtaagatccggcaaaaatggcgcttggtccgttagctttacgaatacgatcatgttgctcatgaatcagttttaatgcctgttcccagctcacctgtacataggtatcttcgccacgacctttcgccggttgcagtggattatcgagatagctttttctcaccatcggatgctgaatacgcgccgtggtgtgtacctgatccgccgccgtagactgtaaggaattcggtatggttttcgccagcgcgcctgtactagaaacaatcttgccgtccttcacttctacgttcatcgctccccaacgtcccgcggtgaggattttaccgcccttctcttctgcccatgcggggagcggtgctgcgcttgtcaccaccagcgctccagcggcaataccgctgtgtttaataaattcacgtcttgttaatgtcataacttcctccctgatcaacgaggatcactgtttctcggtaatatctttggcgttgtactggaaataccgcgttaaaatgtccagttcgttttcgctcatgctggttcgtgcccccattcctttggcaatggacggccacgcattgacggtgtaatggtcggcggcaataggggcatgacaaccagcgcaataggtatcgtcaagtttttcagcgtattgccatagcggtttacggtccgctaatgcgggatcggtaagcgcaccctgtaaagacgcctgacgccattgattgccgtattcgtcagcctgccattccccgtttacagtgagcgccttgataccttcttcacttaatgtggctagcgccagccgttgacctgccgccaggtagagcgtgttttcactgccctgcatttgataaccctgcaacagaacgatcggctgtttgccactggcatcaacgacggtgagatcggttccaggattcacggtagccagctcgcctatgtgagaagttttgaaaggataaatatgtgcgccattagtaacactagtagcggcctgactttccagctcatgcgccgcgttgtcatccatttttatttctggcggaaaatgggcaatgcctttatgacaatcgatacaggtttcgctgtccttttgtgctttgttatgcattttctgcgcagattcactttggctggcaatatccatggcatcaaaagaatggcaactacggcacgttgcagagtcagtggcttttaattctttccatactgtttcggccatttcctggcgatgagcttcgaacttatcgtcactgtctattttgccgctaacaaattcatgataaatatctttagatgcctttaatttagcaaataaataatccatcccactctttggaatatggcaatcggcacattccgcacgtatccctttctggttgctaaagtggacagttccctgatattcctcaaaaggtttactcatgctgtggcaggaaaggcaaaatgctgtatcgctcgttttatgtaagactttttgcgccagcaataacccgccgccaccaaccacaaccgctatcagcaaaaacaataacccaatgcgttttttccctcgcatagattcctctaattaaattactggacaccgaaatcattgtataattaaatatacaacgaattaaccgcttgcataattaggcacaacactgcctgaaacaatcgataaagaatatgatttattacaatgtaatcattaattgctaaggaataacccagttgctatttagaatatatatttatcagttttagtaatttaaatcccataattaatgtgaatatatacaatatttttagcacaacgctatgcgcactgtcacccgctcaacagatcacggttatcgttcgttttttatactgttcagggataaaaaaaggcccctgttgaaattgcaggggcctggtacgagcaagcatcatattgggcgacatgatgcaacggtaaaaatcatttggcctgatggcgttcaatgattcctttcatttcagcaaccgccgccccgtctacgatataacggctatactcgtccgcgtgttcatcactactcatggacaatccttgattacgataacgcatcggactggcttgccacgctcccgcggagctatggacttccagcactccggcatcgaggaagtggtgcaggttttctgcacggactcctgctccggccataatgattggagcatcacgatgggcaataagttccataattttacttaaaccttgcagtgcgtcacttttttgcccacttgtcagtacccgggcaatgcccaattccgcaagattattgagtgtatataaagggttagcgcacatatcgaaggcgcgatgaaaagtcactgccagcggaccggcagcagccattattttttccattcgtggcatatcgacattcccgtcaacatcgagaacgcccgtcaccagtccaggaaaacctaattcgcggaccgtgcgcacatcctcaagaatggcggcaaactcaccgtcgctgtagcaaaaatcaccaccgcgtgggcgaattatcggatgcacagggatcgtcacccgctggcgcacggatttcagtacacccaagctcggcgttaagcccccctcttttggggctgcgcataattcaactctgtctgcgccgttttgctgcgccgttagtgcacattccatgctgtaacagcaaatttccagtaatgccatttttactccttaattacgcgctctgctcgctggcaacgatctcttcaatggaccacggatgaaacttaatagttgttttgccatcggtgaccgccagcgtcggattcggtaatcgctcatgctcaccttttgggctactggttttcacactgatccccggtaggctgagtccttcatcagaaagcaatgccagcgcacgggcattcagcgtttctggatcacccggcagaacgatttcaatatgttcccaaccttcgtgtgggtaacgtttttccccgggccacggtagctccacaatagaaaactgccagtgcgcaacctgtaccggttcatgcaatttaaacagacaaatcggtctgccattgatcatattttcactcaaaagctcgccacactgttcaaacccgcgacgccagcgttcagcagtggcgttttgatggcaacgcaaagaaatgtgatcggcagtcagcggagtgatattcaaccccagacggcgggaaagttcatctaatgcgtggataaatcgcggtaaatcgcttgcaatatcctgcagctcgtcgatagattgccagttcgccataatcactcttcgtctttcagtaaaagcgttaatttaccctgttgccctgtgccaaccaaccgctgatttcacgccgcttctgatgcaatagtgaaaacggcaatacgccacgcgcacgttgctgacgaaaacagccatttgcagtatactcccgccctaatttctttaactggtgcgggcaatttttgctcgcttcatcaatgtaaggtattccggtgaatattcaggctcttctcagtgaaaaagtccgtcaggccatgattgcggcaggcgcgcctgcggattgcgaaccgcaggttcgtcagagtgcaaaagttcagttcggcgactatcaggctaacggcatgatggcagttgctaaaaaactgggtatggcaccgcgacaattagcagagcaggtgctgactcatctggatcttaacggtatcgccagcaaagttgagatcgccggtccaggctttatcaacattttccttgatccggcattcctggctgaacatgttcagcaggcgctggcgtccgatcgtctcggtgttgctacgccagaaaaacagaccattgtggttgactactctgcgccaaacgtggcgaaagagatgcatgtcggtcacctgcgctctaccattattggtgacgcagcagtgcgtactctggagttcctcggtcacaaagtgattcgcgcaaaccacgtcggcgactggggcactcagttcggtatgctgattgcatggctggaaaagcagcagcaggaaaacgccggtgaaatggagctggctgaccttgaaggtttctaccgcgatgcgaaaaagcattacgatgaagatgaagagttcgccgagcgcgcacgtaactacgtggtaaaactgcaaagcggtgacgaatatttccgcgagatgtggcgcaaactggtcgacatcaccatgacgcagaaccagatcacctacgatcgtctcaacgtgacgctgacccgtgatgacgtgatgggcgaaagcctctacaacccgatgctgccaggaattgtggcggatctcaaagccaaaggtctggcagtagaaagcgaaggggcgaccgtcgtattccttgatgagtttaaaaacaaggaaggcgaaccgatgggcgtgatcattcagaagaaagatggcggctatctctacaccaccactgatatcgcctgtgcgaaatatcgttatgaaacactgcatgccgatcgcgtgctgtattacatcgactcccgtcagcatcaacacctgatgcaggcatgggcgatcgtccgtaaagcaggctatgtaccggaatccgtaccgctggaacaccacatgttcggcatgatgctgggtaaagacggcaaaccgttcaaaacccgcgcgggtggtacagtgaaactggccgatctgctggatgaagccctggaacgtgcacgccgtctggtggcagaaaagaacccggatatgccagccgacgagctggaaaaactggctaacgcggttggtattggtgcggtgaaatatgcggatctctccaaaaaccgcaccacggactacatcttcgactgggacaacatgctggcgtttgagggtaataccgcgccatacatgcagtatgcatacacgcgtgtattgtccgtgttccgtaaagcagaaattgacgaagagcaactggctgcagctccggttatcatccgtgaagatcgtgaagcgcaactggcagctcgcctgctgcagtttgaagaaaccctcaccgtggttgcccgtgaaggcacgccgcatgtaatgtgtgcttacctgtacgatctggccggtctgttctctggcttctacgagcactgcccgatcctcagcgcagaaaacgaagaagtgcgtaacagccgtctaaaactggcacaactgacggcgaagacgctgaagctgggtctggatacgctgggtattgagactgtagagcgtatgtaatcgatttttcgtgagagtgaagcctgatcagggttagccgatcaggcttttttattgccatctaaatgtattctgaaaatggacatgccattgttttctcactgttggataagaggccagaagcgtaatatccggccccagggaaacgataacggttgaatttaaggaataccgcagtgtttaaatttcttgtattaacattaggcattatctcttgccaggcttacgcagaagatacggttatagtaaacgaccatgacattagtgccatcaaagattgttggcaaaaaaatagtgatgatgatactgacgttaacgtgatcaaaagttgcctgcgacaagaatacaatctcgtcgatgcgcaattaaataaagcctatggtgaagcttatcgttatatagaacaagtgccacgcacaggtgtaaaaaaacctgataccgaacaacttaacttgcttaaaaaaagtcagcgagcctggctggattttagggacaaagaatgtgaattaatccttagtaatgaggacgttcaggatttaagtgacccttattctgaaagtgaatggctcagttgtatgatcatacagaccaatacgcgaactcgccagttgcagctataccgtaactctgaagatttttatccaagccctttgacaagaggataattcacatctttttggcatgttttgttgcaagctattcctgataaataattgcaacaagacatcgagcctttttcactgagttattaaacatactcgcgagcgcgtcgctacgctagcaagcaaaaatgaaacaggaataatcgaaatgggatgttgcgcacagtcaaaataactcaccgtaaataatcatctgctataaataatcactttcatgcaataccagataagctatttttaaacagacacttaccgcacaacaaactaattaaatacaaagaaaggcaacaatcaacttaatgttaatgaaatgttttacatatattaaccacttgtttaatgcggagaatcagtacactattttcttataattacatttgaaattatatgatcaccgggagtgattgattaattatctttactaataatcagactaatatttacctgtttgaccgagttgggattgcgtcgtttctccattaggagtaaagctttaatgtcacctgaagttcacagaataaggaacaggttatgagctatagcaatattcttgtcgctgttgcggttacaccggaaagtcagcaactgctggcaaaagcggtatctatcgccaggccagtaaagggacacatcagtttaattactctcgcttccgacccggaaatgtacaatcaattagctgcgccgatgcttgaagatttacgcagcgtgatgcatgaagaaacgcaaagctttcttgataagttaattcaggatgcggggtatcccgttgacaagacgtttattgcctacggtgagttaagcgaacatattctggaagtatgtcacaagcatcatttcgatttggtgatttgcggtaatcacaatcacagtttctttagccgagcatcctgcagcgcgaaaagagttattgccagtagtgaggtcgatgtgctgttagttccacttacgggagattaaccgctcttacgcaagctttggaaaggtagcaactttatcgcgctgctggctttccgcgcttcgcggaactatctgctttaggtcgctaatgaagcactcctgccagtggttaatatcgtttttcacgataacgtccagcatttctgcatgacgggaaatacgttccgccaggctcatagtcaatgcacgatccagcgcagctgcaacttcgtcacgatcgtaggggttaacaattaacgcgctcgttaactcgtttgccgctcccgcaaattggctaagaacaagaacgcccggattggctgggtcctgagcagcaacatactcttttgctaccaggttcatcccgtcacgcagtggcgtcactaagcccacgtcagagtagcggaatattttcatcagtaatttacggtcaaaatgctgattcaaataataaagcggcgtccagcctaattgcccgtatttaccattaattcgtccagcttcattttcgagctgatgacgaatatcctgataggcttgcacatcaccacggctcgttggtgcaatctgggtataacgaattttaccatgatgctgcggatatttttccagcaacgcttcataggcgagaaaacgctctggcaaacctttggaataatccagccgttcgacagaaaagatattttgtacgtttttcagttccgctttaagttgcgccagttttggcggcagtggcccggcagcctgtttggctatttctttcggttcaatgccgatcgggtagacttctgttcgaaatgctttgccccaggctgtatggctttttgcgctacgtgtcgtgacgcgggtcaggttagaaagacaatccaggaacgccagacgatcgttttctgtctggaaacccagcaaatcataatcacaaagctgttcaagcaaggtgtcatatgtcggcagcgcgttgaagatttccggtgtcgggaaaggaatatgcagaaagaaaccaatgcgattattcactccccgtttgcgtaattcatgcgcaaatggcaacaggtgataatcgtggatccagataatgtcatcgtcttgcaacagcggcagtaatttatctgccagcaacgcatttacgcgtagatagccgtcccaggcaggacgctgaaattgcaccagatcgagccgataatgaaaagcgggccagagaacggcattggagaattggttgtagtattcgtcaaggtcctgttcgctgaggttaaaagaggcccacgtaatgttaccttttttcaccttttttagcggctgatcctcattccctgtttcaccactccagccaaaccacagtccgcctgcggctttcagtgcccccagtatgccaacggcaaggccaccggcactggcggcgtgctcgtctggtggtgcaatccggttagatactacgactaaacgactcatagtcatcactcctgttatttttacttagatactacgactaaagctctcatagtcatcactcctgttattttctcttttttgttgtaatgcggtggttatcatttcaagccagctccagacatccggcacacccgccagtcgccaacttgcctgagttgcacctgtgccaatttttacactcattccgcccagtcggttaacgactgcgaagccagattcatcggttaaatcatcgcccagaaatacgggcgttcgcccgataaagggagcttcctgcataaaagctgcaattgcctcacctttactggtacctctcggtttgatctcgacaacacactttccctgctgtaacgccatttgtggccagatctgagtaatacgttgcgctaatgtcattaatgcgtcttcatgctgcggagcctgacgataatgcagcgcaaaagccatccctttcgcctccagctccgcgccgggatactgagcgatgactgtatgcagttgcacgctaatatcacgcgcaatcgcatccggcagatgaacgatatgtgttttaccattgatgtcacggcgctccgccccatgcacgcccgctaacgggaagcgataaggttttgccagtgcgtcaagctccaccatactgcgcccacttatcaatgccaatgcaccatcacttgcggttgccagtagctgtagtccttgcagaatattgtcaggcacgacgacctgatcgggatgcggtttgatttccgccagcgttccatcaagatcaaaaaaccaggcatatttcgcggatagttcaggggtttcggttaacggttctgtcacccggttctcctccttctcttttcttattgtgttgcgcagaacgcgctttacagacatgtaagtatagacagtgtgacgggggtcgccatttgcaacgaagaacagccaaccgttatggcggttggctatggtgggaaaaaacgctaaattgttgcagaaaaaagcatcagacagtgcgtttcgctttttgcttgtaacggtcgaagatcaccgctgccagcaggattaagccgcgaaccacgtactgcgcgaaaggagaaatattaagcaggttcatggcgttttccacggtgcctaaaattaagatacccgccaccacataactgatttttccgatgccacctttcagagaaacgccacctaaaacgcaggcggagataacaatcagctcataaccaatgctcgtcattggctgcccactggtcatacgactagccagaataattccggctatcgcacttaccaggccactgagaacaaagataataattttggtgcgaacaaccggtacacccgccagacgcgcggcctcttcgttcccgccaatcgccagggtgttacgaccaaaggtggttttattcagcagcaaaccaaagataatcagacacgcgacggtgagccagattggcgcaggcagaccgaaccagttggcgtaaccaagggcaaagaagctttcatcttcgataccgaccgctttaccgtcactaatgatgtacgccagacctcgaacaatctgcatcgttgccaatgtcgtgatcagagcatttattttcagtttggcgataacaaagccattgaccaggccacagagaacgcccagcaacaaccccgctgccacgccaatccacaggctttcagtcaggttaataaccaccgccgtggtgacacccgcacaggcaattacggaggcgacagaaaggtcaaagtcaccggaagcgaggcagaacaacatgccacaagccaccatcccgctcatggaaattgccaggcccaaccctttcatattaatgaaggtggcaaaatttgggacaaaaatggcacaggcgataaagagcaccgcaaacaccaccagcatgccgtactgatcccagatacgcccgaagctgaaactgctcttaggtgcgccagacccgcttgtagaaacagaagacatcatactctccttactcaggcaacagcctggctgactttaggcatcgcaaggctcagtgcctgacgctcatctgcctgctcgtgtaacaattcaccggcgatttcaccttcccgcatcaccacaatccggtcggcaacgccgaggacttcaggtaagtcgctggaggcaaacagcaccgccacgccctgcgccgccagcgcataaattacgttatatatttcgtgcttagcgccaacatcaatgccgcgcgtaggttcatccagcaaaatgaccttcatctcttcgcttaaccagcggcccagaatggctttttgctgatttccgccactgagattcatgatcagttgctccgcgcccggcgttttgatgttgaggctacgaatgtggtgatcggcattgttttcttcccaaccgttgttgattacacaaccgccgagcacatgtttacgtctggcactgatgttgatattgtcgcgaacggagtgcacgggaataatgccttccgctttgcgatcttccgggcagagcatcatgcctgcggcaatggcgtggctcggtttacgaatatcgatcggctgttggtcgatataaacctgaccggcggtgatttgcgtcccgccaaacatgcctttcattaattcgctacgccccgcccctaccagaccaaacagcccaacaatttcaccactgcgaaccgccagacttattggcgtacgcacgcctggtgctttcacagcatcaagacgtaggcgctcctcgccataactacgcggttgccagccgtagatatcgccaatgtcgcgcccgaccatcgcctgcaccagcgcgtcgtggtcaacctgctacatatcggtaaaggttttgacataacgtccatctttaaagacagtaatggcatcgctgagggcaaatatttcttccatacggtgagaaacgtataagattacccgcccctcttttcgcagttcacgaataacgcggaaaagattgtcgatttcacgggcagagagggagctggttggctcatcaaaggcgataattttggcgttacgcgccagcgctttggcgatttcaaccatctgccactgaccaatggagagatatttcagcggcgtgtccgggtcaatatccataccaagatgtttaagttgtaaacccgcctcataattcagcaaactgcgattcacaatgccgcctttatgcggcagctggccgagatagatgttttccgcgacggtcatttccggcacgagatgcagttcctggtaaataatcgccacgcccgcgttaagtgctgcggtcgtgtcggaaaaggacatttcctgcccattaatcactacagaacccgtggttggcgcatagttgccgctgaggatttttaagagagtactttttcctgcgccattttcacccatcaacgcatgaacctgaccggcatagcagtcaaaactaatatccgtcagcgccttaacgccgggaaacgttttaccgatgccgcgaaaactgagatacggggtagactgttgcataacgtctccgtgaatcactggtcgttcacaccccctctgcatcatgcagaggggaatttttccggcaaattacttaccgcctaaaccttttttctccagttcttctttaaagttgtcacgcgtgatcagtaccacgtcggtaacttcggtaaattttggcggttcaacgtcttttgctacccagttgtaaagcatttcgctggatttatagccatgtacgtccgggcttggcagcagggaaccgtagaagccggttgcctgtgctttagacagttcgctcaccgcatccacaccgttaatgccaatgccgatgatatcggccgctttaaagccctgaccttccgtcgcgcgtacgccgcccagcacggtgctgtcgttcataccgacgatcagccaatgtttaacttccggatgttgaaccagcatactgttggcagcgtcaaatgcccccgggatgtcgttagatttggtaggtacctgataaatttgtttttccgggaatccggccgctttcagcgcatccatagatcccgtagtacggcggcgggcggtatccagttcgttggcggtaatcgccatcaccgcgctttctttgacatcccagccacgtttctgcatctctttatacagttcctggccctgacgttcgccaattttagtcgccgccatcatcaccagcggaacggtatccattggcttacctttggcgttaacaaactggtcatccacggcaatgactttcatatcgtagccacgcgctttcgcgacgatggcagagccgagtttggggtccggagtacaaataacgaaaccttttgcgccactggcagccaggctgtcgatcgcgttcaatgttttttcgccatccggcacggcaatcttaataacctcaaaccctaaatccttcccggctttatcggcaaacttccattcggtctggaaccacggctcttccggttgcttcaccagaaaaccgagcttcaggttctccgccatagcggattgactcataacggctgccagaccaatggctgccagggctttagtaaatttgtgcatggttctctccagctttagtgtcgttttgtgtagggcaaaaacgaatgacattcgttaaattaatcggaaaacaaagcattaccttttaactaaaagataagtgactgtgttgacatagttttagcgagaaattaattctccataggagagcaatatcacatcgcagaattacagtgagaacgtgcataaatttagcgggaaaagacataagggaaagccaatttgtcagacaaattgtcgaatgcacagcagattaatccataagattagcctggaaatccttgttgtctttggtacccatgcgggatgtcttctttttaaccagtcaataggccgcattacctggcgttgagtttttgaaatggtgtaataaccgcaactcaaagatgtggaaaatgcacgtcattcatttcgtcattaattatcactgtgctcattaattaacagaacacgtataatgagagccatctcgcaaaaatgaaaaaacgttttataaaatcatcacttcatcatgaattcaaattcattgattaatatcaacaagatacaaaaagcactatcattaaaattcattgcagttacattgatttcatcaatgaaatgtaaaaatatataaacttgatgatttaagcattttcttatacccgttcagacgttattcttatttcagatcatcgtcagaattgactccacgatcacatttcggaccggcagaaaggaattattctgcaaacagtaattatggtgttttgatttatcttgcacctctccacttctggatataaggatattaggtatggcaaccgctggaatgcttctcaaactcaactctcaaatgaaccgcgagttttacgcatccaatctctaccttcacctgagtaactggtgttctgaacagagtctgaacggcaccgccactttccttcgcgcccaggcacagagtaatgtgacccaaatgatgcgcatgtttaactttatgaagagtgtcggcgctacccccatcgttaaagccattgatgttcccggtgaaaaactgaactctctggaagaactgttccaaaaaacgatggaagaatacgagcaacgttctagtacgttggcacagttagccgatgaagcgaaagaactgaatgatgatagtaccgtcaatttcctgcgcgatctggaaaaagaacagcagcatgatggtctgttgctgcaaaccattcttgatgaagtgcgcagtgcgaaacttgcgggtatgtgccctgtgcagaccgaccaacatgttctgaatgtcgtgagtcaccagctgcattgatcatcatcggcgctaatgcattgcgccgatgaaggttttgagaaaccgctgcctcatctgtttgaagcagcggtttttttaatgggattcaccctgtggggtaaacttgagttcaataagcgcgatggctttttggattgcccgcatggtgaccgggtctgcggcggcgggatggttagtaaagtcgatattcttcagctgactggacattttttcacgaacttcaacgggcgcgattacatcgagaacatccagaatttgtttgataaccaactggcaagcaaccacatcagaaaccaattcctgatcggcattcagcggctgggacatcgtaaactcctgatagcattttgaaagccgttatagtagcgacttcacatcttcagcgatagtcacatccaccgtcatcaggacacaaaaaaacctgccggagcaggttttttgttatcggaacatattgcctggcggtacgtctttgaacgtcttgcaatagttattgaacatacttttcaggattttgcgcagtttcatcgcggcactccgaccatttgttatacaggtgttattgtctttgcgcttataatatgacaaccatcacaaaaatcaatctttatgtgatacaaatcacataaatacccctttaatgttataaaaatgataatcaaaaaacagcccccctatttctgacacctacagatggcaagaaatagcgcctgccaggcgtcttttccggccattgtcgcagcactgtaacgcgtaaaatagtgctttctcttactcttctggctggaccatgagacttctgattctgactcttagtttaataacgctggcggggtgtacggttactcgccaagcccatgtgagcgaagttgacgcggcaacaggtattgtacggttagtttatgaccaggcttttttgcagcatgcccataccgatcgttatgtcagtcgcgggatcgccgatcgcgcatgccagcaggaaggctatacccacgcggtcccctttggtcagccagtaggcaactgtagcctttttgcgggttccttatgtttgaatacggaattcactttgagttatcagtgccatcattccgccttccctgtctttctctaaatattttaatcagcgaggggatcttcgctgattaaagaaatagcggtaatgcgttttattcccattcgtatttttaataattgaagtttatattttaccttttgcaaataataaaataacaaattatagtgacgccacagcaacaaatataacctttgtggagcactatcatgctgaaaccagaaatgattgaaaaacttaatgagcagatgaacctggaactgtactctagtctgctttatcagcaaatgagcgcctggtgcagctatcataccttcgaaggtgctgccgcgttcctgcgccgtcacgcccaggaagagatgacgcatatgcagcgtctgtttgattacctgactgataccggcaatttaccgcgtattaataccgttgaatctccgtttgctgaatattccagtcttgatgaattattccaggaaacctataaacacgaacaattaatcacccagaaaattaacgaactggctcatgctgcaatgaccaatcaggactacccaacatttaatttcctgcaatggtatgtttctgagcagcatgaagaagagaaactgttcaaaagcattattgataaattaagcctggcaggcaaaagcggcgaaggtctgtattttatcgacaaagaactctctaccctcgacacacaaaactaatgctctccggcggcaggtttactgccgccgtttcaaatcagtgacggcaaatcttactctgatcggtgctaaaaccgtctttgctaggtataaatttgccttttgctgccagaaacgctaccagctctcccgctgtcatcccttctgcgctgcaggtgtgaaaacgtgcctgttcaccaaaacgcgctttaatcgcagcttccagactggcatgcgtatattgctcgccactttcaatcatcatatttaacacttcatgaccgtgaatagagtccatcgtccctcctcaaaaaaagcctagcgtagcgattgccgcttatgaagactttgcgccagcgcaggactgaatgctttttattgtacatttatatttacaccatatgtaacgtcggtttgacgaagcagccgttatgccttaacctgcgccgcagatatcactcataaagatcgtcaggacagaagaaagcgtgaaaaacagaaccctgggaagtgtttttatcgtggcgggaaccacaattggcgcaggcatgctggcaatgccgctggctgcggccggtgttggttttagcgttacgttaatcttgttgattgggctttgggcgttgatgtgctacacggcgctattactgctggaggtgtaccagcatgttccggcagataccggtctgggcacgctggcaaaacgctatctgggacgctacggtcaatggctgacgggcttcagtatgatgttcttaatgtatgctctgactgcggcatacatcagcggtgccggtgaattgttggcctccagcatcagcgactggacaggtatttctatgagcgcaaccgctggcgtgctgttgttcacttttgttgccggtggcgtggtttgtgtcggaactagtctggtcgatttatttaaccgttttctgttcagcgccaagattatttttctggtggtaatgctggtactactgctgccgcatattcacaaagtgaatcttttaaccctgccgttgcaacaggggctggctctgtctgcaatcccggtgatttttacgagctttggttttcacggtagcgtgccgagtattgtcagctatatggatggcaacattcgtaagctacgctgggtgtttataatcggtagtgcgatccccctggtggcatatattttctggcaggtggcgacgcttggcagcattgatagtacaacctttatgggattgctggctaatcatgctggattaaacgggctgttacaggcgttacgcgaaatggtggcctctccgcatgttgagctggcagtgcatttatttgctgatttagccctcgccacgagttttctcggcgttgcgttaggcttatttgattatctggctgatttatttcagcgtagtaataccgttggtggacggttgcaaactggtgcaattacgtttctgccgccgttggcgtttgcactgttttatccacgaggatttgtgatggcgctgggttacgccggtgtggcgctggcggtactggcattgattatccctagcctgttgacctggcaaagcagaaagcacaatcctcaggcgggttaccgggtcaaaggtggtcgtccggcgctggtggtggtgtttctctgtggtattgctgtgattggcgtgcaatttttgattgcggcagggttgttaccagaagtggggtgatcagatagcctcaaattccttattgggtgccagaattaacgctgacacccaatttggcctcttaatgcaggcagcactgcttaaatttcttaccactaccgcacgggcaaggatcgttacgccccggtttctcttctgctttgatcggttgctgaacagctttttcctgcggatgcgccatccagtacgcatgtagatcaagcgccgccagtcgaatggcatctacgctctcttcaaacgcttctgggctcatcttttctacccgctcgaagttttcctcagtaccgtgcagcgcaatcgcctccagcgctggttttaagctatcgggcaacgtactccagtcagaaagtgccacgccccgcatatagccaaagcaccactcctcaacaatcgtcagctcgctgccatcaacttctcgcaagccgaataacggctcaaactgctccgggaattcgttcagacgctctgcggtatcggccatatgttgaaaagccagattcataaagcgcgtcatctctttctcactcgcccagcgcggcacatagtcagccccaccccacacggcaaccagccactgttccggttcaatctcttgcggagaactcaacaccgccgtcaataaaccgtccagctccgccacatcaaggatggcgtggtcagtgttgtatttggtcagaatatcgtccagccattccaactcactttcgtttaacggtcccgttttcatacgcttttccttgtggatctcaactcgccagcacctatcttacatgccggtccgtatcagagatactttttgagtggctttgctggtgattaaaaattaaggagggtgtaacgacaagttgcaggcacaaaaaaaccacccgaaggtggtttcacgacactgcttattgctttgattttattcttatctttcccatggtacccggagcgggacttgaacccgcacagcgcgaacgccgagggattttaaatcccttgtgtctaccgattccaccatccgggctcgggaagaaagtggaggcgcgttccggagtcgaaccggactagacggatttgcaatccgctacataaccgctttgttaacgcgccaaattcttcaggcctttcagccagacatccgcttgacgccgatgtcttttaaactggagcgggaaacgagactcgaactcgcgaccccgaccttggcaaggtcgtgctctaccaactgagctattcccgcattcatcaagcaatcagttaatcacttgattttattatcgtctggcaatcagtgccgccgttcgatgcgttgcattctacttacctggcgcgatgagtcaacgatatttttcaccacttttgatcgtttgctgaaaattacgccgaaacgatcactgatcaagcaaatctgcacgcgcagcgctcaaatattgcaacatactccacagagtcagtaccgcagccacaaagaaaagtgcaataccggcgtactcaacccaaatgttcggacgccacagcagccatgccaacgccaccatctgggcagtggttttcactttcccaatccaggagacggccacgctactgcgtttacccaactccgccatccattcgcgtagcgcagaaataataatttcacgggcgatcatcgttgccgccggtaatgtcacccaccagctgtgataatgctcggttaccagcaccatggcgatagccacgagaactttatctgccacagggtcaaggaaagcaccaaaccgggtactctggttccagcggcgtgccagaaaaccatcgaaccagtcagtcaccgccgcgacgcagaaaatgagcgcggcggcaaacgggctccaggtgacaggcagataaaagaccaatacaaagaatgggataaggatgacacggaacagtgtaagcaacgtagggatattaaattgcataatgacgggtaactatctgttgtcagtaagattacccctatgttgctacagagacatcaatgtttcaagctccagaagatcttttctgccagaccttggctaatacccggcacttttgcaatttcctcgacgctggcgttacgtaaaccttgcaaaccgcccatatatttcaacaacatttgccgacgttttggcccgacgccttcaatggtttccagggaactggtatttttgaccttcgcccgttttttacggtgcccgccaatcgcgtgatcatgactttcatcgcgaatatgctggataacatgcagcgcgggactatctggcggcaaactaaatccctcaccttccggctcaaagaacagcgtttccagtccagccttacgatctgctcctttggcaacgccaagtagcagcggatgatttttatcccaactgacatccagttcggcgaagacatttttcgcctgcgcaagctggcctttgccgccgtcgataaggatcacatccgggatcttactgtcgtcaatggctttaccataacgccgacgcagcacctgattcatcgccgcataatcatcgcccggcgtgatgcctgtaatgttatagcgccgatactccgcacgcagcgggccgttagcatcaaacaccacacaggaagcgacggtttgttcgcccatggtatggctgatgtcaaagcactccatccgcttcacttccggcaatttcaacacgctggcaagcgcggtcagtcgctggtgaacggtagattgctggctaagtttgctggttaaggccgtcgccgcattggtgcgcgcgagtttcagataacgcgccctatcgccgcgaggtttggtttgaacattaatcttgcgtcccgccagttcactaagggaatcggcgagcagcgttttatcgctaagattaaaatcgagcaggatctcacccggtaaggtgcgcatctggctgccttgtaaatagaactggcctacgaaggtttctaccacctcgctcagttccgtaccgccaggcactttcgggaaatagctgcggctgccgagcactttgccctgacgaatgaacaatacgtggacacaagccatgcccgcatcgaacgccacaccaataacgtcgaggtcgtcgccggtattggaaacgaattgtttttcggtgacgcgtcgcaccgcctgaatttggtcgcgaatacgtgcagcttcttcaaactccagattctggctggcagtttccatacgactaatgagttgcgtaagcacctgatcatctttgccagacaaaaacaggcgcacatactcgacctgctgagcgtattcttcttcactcaccagtccttcaacgcacggtcccagacagcgccctatctggtattgcagacacggacggctgcgattgcgataaacactattttcgcactggcgaatggggaaaatcttttgcagtagcgccagtgtttcacgtacggcatagccattcgggaacgggccgaaatattcacctttggcatgcttcgcaccacgatgcatcgccagacgcgggtgggtatcaccactcaggaagataaaaggataacttttatcatcgcgtagcaaaacgttgtaacgcggctgatagagtttgatgtagttgtgttccagcaacagcgcttcggtttctgtgtgagtaaccgttacatcaatttgctggatctgggcgaccagcgcttcggttttgcggctagcgaggttgctacggaaatagctggaaagccgttttttcaggtctttcgctttgccgacatagataaccgtaccaccagcatcgtacatgcgataaacgcctggctggctggttacggtttttaaaaacgcttttgcgtcaaactgatcactcactgactacttaatgtctccgcattacacagaccatggcgaattgccaggtgagtcagctcaacatcgccatgaatgtttagtttactgaacatacgatagcggtagctgttcaccgttttcggactgagattgagctgttcactgatctcattgaccttctggcccttggtgatcatcagcataatctgcaattcacgttcagacaaactggcaaatgggctttctgttttttctggttcgatctggcttaacgccatttgttgagcgatgtcagaagcaatgtaacgctgcccactatagacagaacgaatcgcactcacgacttcctgcggagccgcgcctttgctgaggtagcccgcagcaccggcctgcatgactttcgctggtaaagggttttctgtatggacggtaagcatgatgattttgacatcagctgtggaacgcgcgattttacgcgtcgcctcaagaccgccaatgcccggcatactcatgtccattagcaccacgtcaacggcatttgtccggcaccacttaacggcgtcttcaccgcagcttgcctcaccgacgacttttataccctttatatcttccagaatgcgtcgtatccctgcgcgcaccagttcgtggtcatcaacaagtagaacgttgatcaaaggaatatctccagaaatagggataacgctactgatagttagtcattcgtatattagcggtttttattgcaactttgaaacgttaaaaatggtgggtattcgatttttctctcgtttttgtcaattcgattgtccacagttatggtcacgcccgtcaccaacggcttaccggatcgtttcacagtaagccctacgatgaaatgtgacaaaaattgactttattcagcaaaaatgaaaatcagcccgctgaatatgtaacattaattaacccgaacaatacgggcaaaaaacattcatgataaaaatatttattggtcattatattaacgtattttatagcactgccgatatcacgctcaaaaaacaaccactgctatttttagcaaagcttatggtatactccgccgccttaacatttttcaccgcaaattttcattgcaacatgacgaggaaaataaatgagtacgcctgatttttctactgccgagaataatcaagaactggcaaatgaagtctcctgcctgaaagcgatgctgacgctgatgctgcaggcgatgggacaagctgacgcgggccgcgtgatgttaaagatggaaaaacagcttgcgctgatcgaagacgaaacccaggctgcagtattttccaaaacggttaagcaaattaaacaagcctaccgtcagtaatataaaaccggctgatagcgtgcctttcagccggtttttgcatctggcacgcaggacagaaaagagatcaaattaagccagtagcggccgcgtaacaggcaacctgggtcttatttggtgcattaatttttttctgcatgtttttctggtggaaattgaccgtattctcagagatactcaaaatcatcgctatctctgcacttgttttcccttccgccgtccacctcagaatttctttttcgcgcttgctgaaattcatctctggcgtcatcactatttcatcatttaaacgcatcagagccatcagactttcgcgcaccagtaactgcatttttaattgcagttcatcactaagaatgggtatttcgcgcgcgctgcaacgggaaaaggacaaaaagcccagcgcccggtttggcagcattaaatactgagtgacaccgcggcgtaaaccatgtgcgcgcgcggcttcccataacggctgtgcttcgctgaataagtcatcattccacattaaatggccctgactaaagttttcagggttcagcaccggatcaattgcgagaaagttttttgcctgataataactaacccacgcctcagggtaattggtgtaaaaagccactttaggtcgagtgaatggtaccgggtggcggacacataagctatagtaatcgtactccagctgctgagcctgaagctcaatttcatggtagacctcttctgcggtctccatcctctgaaaacgcaacagcatcgtgcgacgccagctgaaaaaatccttatcctgcatagtaaaccgcaacgcccttgagagtgagtatcatttataatgataattcaaactatcacataaataagatttatatataatttatattattcaggcaatgaattacttttgcaagccatcgcattctcttatgttattaatgagttatgctgatttgttaagcagttttatcaggcttgaaatggcgtccagccccgacaggtgaatcgtcggggctgattttttcttattattgcagcagaaacttctcgaggaactggcgggtgcgaggctgctcggttccgtaacgtttatcatgttatcctaaggattatccgaaaaataatacctacgaacatcttccaggatactcctgcagcgaaatatttgttttaagctcactcacatatcgcaacatttactttactttaagacaattccaggcaaattatacaacactttacgggatagtaagtccgcctgaaaaatcgcgagagtggcgcattaggtgacccatgttgttccgtttagtcatgatgaaatattcaggtaaggggaattatcgttacgcattgagtgagggtatgccatgagtacgattattatggatttatgtagttacacccgactaggtttaaccgggtatctgttgagtagaggggttaaaaaaagagaaatcaacgacattgaaaccgttgatgaccttgccatagcttgtgatagtcagcgccctagtgtggtgtttattaatgaggactgtttcatccacgatgcttctaacagtcagcgtatcaagctcatcattaatcaacatcccaatacgttatttatcgtttttatggcaattgccaatgttcattttgatgaatatctattggtcagaaaaaatttattgatcagttctaaaagcattaaaccggaatctctcgacgatatccttggcgatattctgaaaaaagagacaacgataaccagctttttaaatatgccgacgttaagtttgagccgaaccgaaagcagtatgttgcgaatgtggatggcaggtcagggaaccattcaaatctctgaccaaatgaatatcaaagccaagaccgttagtagccataaaggtaatattaaacgtaagatcaaaacgcataataaacaggttatctaccatgtcgtccgactgacggataatgtgactaatggtatttttgtcaacatgcgctaacacattctgactggtggtttcccaccagtcaggctgaataagattactctgctttctccacaaagataccgtcctgatgccctgcttcattaaagaaccagatgccgagcgggtagtcttccaggctaaccaggtacattgtgccttcactaaactcctcaactgccagtaccacgccaggacgacgcggaccgccatccgttttgactgttacccgatcattcaccttcatcgttttcctcctgtggctttgtgccagtgtagaacaatttcgtttttctggcagcgccaggcgcgcgcgagtgctgattttctcgacggtctatacttaagagatgccaggcggacttaacgactggcggcaacaacagagtaacggttgcgaggaaagatgatgaaaaccgcaaaagagtacagcgataccgcaaaacgtgaggtcagcgtcgatgtcgatgccctgctggcggcgatcaatgaaattagcgaaagcgaagttcatcgcagccagaacgattctgaacacgttagcgtcgatggacgtgaatatcatacatggcgtgaattggcggatgccttcgaactggatattcatgacttcagcgtctctgaagtgaatcgttgaatgcacaataaaaaaatcccgaccctgagggggtcgggatgaaacttgcttaagcaagaagcacttaaaaaattcgttacaccaggaaatctgatgtgttcatcaccttatccgcaatttttttcgctgacaagaaaatattcgccatatgaatgattaacgctacttatgaatagaaatgtgacgcacgtcaccccttggtggctctggcgtcagcgggatcgctcccgaaaaaatcatctttgataatttgtgcggttttgagaatcatcctggtaagaggagtactgcgcgactatgtttagtattcaacaaccactactggtttttagcgatcttgatggcaccctgctggacagtcatagttatgactggcaaccggcagccccctggctcacccgtttacgcgaagcaaatgttcccgtcattctctgtagcagtaaaacaagtgcggaaatgctgtacttgcaaaaaacgttggggctacaaggtttaccgctgattgccgaaaatggcgcagtgatccagcttgctgagcaatggcaggagatagacggttttccacgcatcatcagtggtattagccatggcgaaatcagcctggttttaaatacgctacgcgagaaagaacattttaaattcacgacttttgatgatgtcgacgatgcaaccatcgccgaatggacgggattaagccgtagccaggcggcgctgacgcagcttcatgaggcgagcgtaacgctaatctggcgcgacagtgacgagcgtatggcacaatttaccgctcgtctgaacgaactgggcttacagtttatgcagggtgcgcgcttctggcacgtactggatgcttctgccggaaaagatcaggctgccaactggattatcgcgacctatcaacaattgagtggcaaacgcccaaccacacttggcctgggcgatgggccaaacgatgcgcccttactggaggtaatggattacgcggtgattgtgaaagggctaaatcgtgaaggggtgcatctgcatgatgaggatccggcccgcgtctggcgaacgcagcgtgaaggaccggaaggatggcgtgaagggctggaccattttttctccgcccgttaagcgttatcgctcgcgaatacccgattacgcccagcctgtttagcgagataaagccgacggtcggccagactctggagttgttcaaaatcataatcaccggtttcctcgctgctgcttacccccaggctggcactgatgcgtatcgtcgtactcttggcgatcaacatctctttttcatttaatttcagtcgaatacgttctgcgacctccgcagcctccgtcagactcgcgcctggcagaatcacacaaaactcctcaccaccgacccgcccggcaacgtcctgcgcacgcaaggaactgctaattaatccggcagcatgagaaagaacacggtcgcccgcctgatgaccaaagcggtcattaatcgctttaaaatggtcaagatcgacctgaatgacagaaaaaggatgttggtgcgtctgacacaatttagcgagcggacgggctttttcgaacagtgcgccacggttatataaacgcgttaaggtgtcgtgccacgcctgccactgcaagctgctttgcagaacatacatgttgctaaccatccggcgaatcacataccaggagatgagtaacatggtggtaaagagcgcccacagcagggttaatgcaatgctgatactgccgaaatcgccgcgcacgccttcgcttaacgtatggacacgcaccagcacaccgtcgaaatggtccagacgttcccagctaacatagcgactgtccatacgaatgccgccccgcgtgtcatgttccattgcctgcgccagcaaggccagttcacgaggatcaaaaatattccctgttggatggtcaggattggaagaggtcaaaaatctcagcttactgtcatagagctgatactcaccatcgaggtttttatcgatggcgtttcttaaaaattgctgcatagtacgcacgggaatactcatccccagcacgccataccagtagttattactgtctaccggaacactgacggtaacctgcggttcagtattgctggcgtgttccggttggctagtgaaccagcgtaccgcgcggtgacgattttctcgttgactatggccaataaaccagggttgggtgacatagccgtaataacgcgttggaacattgcgcgtaaacaaggtcggctgcgtgctaacgtaaaatccggcacggctgacatacatcgcctgttcaaccatgctgctggagttgtgcgctagtcgcagcaagtaaccaacttccagtgcagcggtaatttcattgtcgaggctttcattttcgcgagacaggagattcccctcgctgactaatgcatcgctcacaccattaactggcagagtgcgtcgtcggttgagttcgattttccaggcgtgctcgtcgcgatgctgttcgaactcggttacagcatcacgcagagaggtgaaatccagtggcgctacgagagcttcgcgcatgccattacgtaaaaagatcagtttgtcgacgttatactgcaaatgcttatcgagcgcgttggcaacgttttccagatgattacgctggctggagatataggcatcttccagcaccaccacttcacgccaggtgagcaaggtggaaaaaagcaataccacgataaagcagagattaacgacatgaccaggccccaggcggcgtgcgagttttttcaaccagctctggttttccatttttgtctcgtgctgcaccctgacgactcccaacctgcttttttatgattctggcataacctggcgatagcgtaccgcaaaacagcgataattttataatggtggcatgataagacgcgactatcattcattgcaggcattagcacaccaggccggatgtgatccggcctgatgttaatgataccctttcacacttcttccgcagaacgactcccctcccccggaacaagctcggtttcatgaaaagcttcccgcttgaccccgtaaccgtcataccaacgacactcaaccataccgctggagtatccagtgacaatcatccgcgggccgccctctttaaccgtaacttcctcactaaccataaagctcatactcgcctccttttttcgagtgaaacttgttcaccttagttgaagatggcgaattttgcataatagccagtgcgagtattaatgtgcctgaccgcgcattttctctacggctttcactcccagcaccacgatgccgccgatgataaatccaagaatcagatttaaaacagtcggtaatatcatcgccactactgcactttgctgcccggcgaaatgttcaatggcgtgatgcagcggcgcaattccatgtaccacaatcccaccgccgacgaggaacatcgccagcgtgccgacaatgcttaacgctttcatcagccagggcgcgataatcaataaccctttacctaatgcctgcatcagcgcgctggatttttccgccagccaataccccaggtcatcaatcttaacgataacccctaccagaccgtagacgcccacggtcactaccagcgcgatgccactaagcaccagcacctgattaagcaacggcgcttcggccacaatccccagcgtgatggcgacgatttccgcagacaatataaaatcggtacgaatcgccccttttattttgtccttttcaaacttcagcggatcctgcgccgccagcttctccagacgctgctggctctgcgccggatcttctttatgtttacgcgcctccagcatatgcagcactttctctactccttcaaagcagagaaacgcgccaccaatcatcaacagaggcgtaatcgcccacgggataaacgcactgatgatcagcgccagcggcaccagaatcactttattaatcaggcttcctttcgccacgccccagaccacgggaagttcccggttggcccgcacgccactaacttgttgcgcattgaggcttaagtcatcccctaatacaccggcggttttcttcgccgccagtttgcccatcacggagatatcgtccagtagtgtggcgatatcatcgagcaacgtcagtaaactactcccggccaaaagcattccctctcatttttattgttgaagggtgtaagtatgaagcaaaaacggcagctctgatacttgcttcacaggtcaacatttttttaacaatcaagtgcaattatatctctcgccagcagaatgattttcacgtttactatgaaccacctttttatttccaccgtgagggattatgcgtttccgccagttgttaccgctttttggcgcgctgtttgcgttgtatatcatttggggcagtacctattttgtcattcggattggcgtggaaagctggcctccgttaatgatggcgggcgttcgattcctggcagccggtattttattgctggcatttttgctactgcgcggacacaaactccccccgctacgtccgctgctcaatgccgcgctgattggcctgttattgctggctgtcggtaatggcatggtgacggttgccgaacatcaaaatgttccttccggcatcgccgccgtagtggttgcaaccgtgcccctctttaccctgtgcttcagccgcctgtttggcattaaaacgcgcaaactggaatgggtgggtattgccattgggcttgccggaatcatcatgctcaatagcggtggaaatttaagcggcaatccgtggggcgcgattctgattttaatcggcagcattagctgggcgtttggcagtgtttatggcagccgcattaccttacctgtagggatgatggcgggtgcgattgagatgctggcggcaggcgtggtgttaatgatcgcgagcatgattgcgggtgaaaaactgacggcgctcccttcccttagtggcttccttgcggtcggctatctggcgctgtttggtagcattatcgccatcaacgcttatatgtatttaatccgtaatgtcagtccggctctcgccaccagctacgcttacgttaacccggtggtcgcggtcttgctgggtacgggactgggtggagaaacactgagcaagattgaatggctggcgctcggcgtaattgtcttcgcggtggtactggtcacgttgggaaaatatctcttcccggcaaaacccgtagttgcgccagttattcaggacgcaagtagcgagtaatcaagcgagtaaatgaatcccctgcgtgtcgatctgcgcgctggcaccttcgccgcagatccactcttccagacgctcggtaagcgcttcatccgtcagcttctcgcgcccacgtaacgcgcactcccagacaatcaatacgcgccagccgagttcctgcaagcgactgatatcgcggcgatcgcgctcaacatttttacctatcttctccagccagaactcggttcgagtcgcaggcactttaaacagatagcagtgatgatgatgccagaagcagccatgggtaaatatcacgcagcgatattcatcaacgacaaaatccggacgtccgggcagactggcgtcctgaacgcgaaatgccaggccctgcccggttaacagactggcgaggcgcttctctatcgccgtatcacgcgtggcaatcgcgcgcatatttttgctgcgagtggccttatcgtgaacgtcggccatgttgtgcctcttgctgacgcttagttatcgactacgtcggccatgttgtgcctcttgctgacgcaacgccaccgcctgtttgatttttggctcaagcagttttgccaccgcggcaaagaccggcacgaccacgctgttaccgaactggcgataggcctgagtgtcgctaaccggaatacggaatttcgcttctcccggcgcttcaaaacccattaagcgcgcgcattcccgaggcgttaaccgacgtggacgatgttgctgattcagcggatcgtcaaagtctttctcacccgtggccatatcccagccgcgatcgattaaaatttccgcgccatctttgtaataacgcgcagacagcgtacgcgtgacgctttgcggattgttcggataaaccattccataaccgaagccgttaccgcgcgcctgatgttttttcgcatatcgatagaggtacttccacagcaccggcgtcaggatatatttcgcctcgaccatcgggtccaacagctgcgccagcgtcactcgctgcgcagggaaacattcgctgatatcacgcagggtaaaatcggctttcagattcagatcgcgacgaaaacccaccagcacgatgcgttcacggtgctgcggcagaaaatgtttgccgtcgatgattttcggatcgtctggcccattatcttctgcatcagccacgtcatagcccagttcgtccagcgtctgcatgatgatgcggaacgttttaccctggtcgtgacttttcaggtttttgacgttttcgagcacaaacatcgccggacgacgcgcgtcgataatgcgtaccacatcaaaaaacagcgtgccctgggtatcgcaggcaaaaccgtgcgcccgcccgaggctgttctttttgcttacgccagccaggctaaatggctgacaagggaaaccggccagtaaaacatcgtgttcaggaatgtgttgacgaatatgttccgccgccgcctcatcactcacgccttctttatggctgagggtgatgtcgcggatatcttcattaaaatgatgcgtcgccggatcgcaataatggttggctttataagtgcgtaccgcatgtttgttccattcgctggtaaacacgcactgtccgccaatgctttcaaaaccgcgacggatgccgccaattccggcgaatagatcgataaagcgaaacgcataatgcggatgatgtgccggtggtttgggtaataacgtttgcagatgggcgaactctttctcacttaaacggtgccatgcgctgtcattcgccagcgcacgttttaaaattgccgcgctccagtgattctcacctacaccattaagctgcgccaccaacgttttaacatcataaatttgcagcagtttctccagcattgcctgtgcggcattcccggtgctgtaactatcggttacacttatattttcctgcatagatttcaccggccatctgagatggccgacaggttaacataattacagccatttagggccacgcgctcagccagcggaactaaacgcatctatcaccttgtgatcgacaccttcattctcccccgccagttcggcactgagcttcgccataaactcgactaaaaaatgcgcgttgtgctgcgccagctgcttgcctcttgcggtttgcatggtttgcggtagcttcagcaacttagtctggaaatgatccagcgcgtagcgtttatcatcaagcgggcgatgctgtgcgaacggatcttcaccatcaaacagcgccacgcccaatgccccactaacggcaaacacgcgcgccaggccaatcgcccccagggcttccagccgatccgcatcctggacaattttagcttccgttgttaagggggcgatttgcgcgctgaaactgtgagcggcaatggcatgacaaacggcctcgattttctccgccggaaattgctcgaactcttcacggagcaggcgacgcgtctcttctgccgccaggatactagaacgctgcctttgcggatgatttttcgccaggctcacaatatcgtgaaaataacaggcggttaaaatcaccagcatatcgacatcgtcatctgccgccagcttctgtgccgtagcccagacgcggcgaaaatgacacacgtcatgggccgcgtcctggtgctgatgatggtttttcaaccagttttcgaactgtgcctgccagtgttgtaagtccatacgcgctccgttgccaaagagtcgccaccttagcagtttttattcatagcgtctgctacgtgcgggacgaggtcgggtgtaccaggcaatgctgcctaacaatgccccgaccagagccataaataaaaatccgaccagtgcccctaaccactttcccgcggtagagcctaaatcgctttcaaatccgctcacgggggcatcgggaatccggctcatcacccagatgtaacgcgccattgcccagacgaaatagccacaccatgtatagaaagcccacaaagccagtttgccgccagggctgcgagagagtctctcttccatctttgtgctaccgtattccattttgagataacccggaaaattcagacttagtactattatgtgataaaagtcacatttttccacattggatgagccagtcaagactcaatcattttttgaacaaatagataaattttgcgcaacggcagtgaatacaggaaaaatcgttttgagcgattttatttatctttgatatcggctttattaattcatttaatcaatatattagcactgattacaattatacctttttattattctgtgtcatgatgcttccgttattagccttttatcgtcttgtttatattttttgggccggcatgatgccggctttttttatgccttcattaatgtgcgcctgatcacaccagccgtttggcgcaacaatcattgataccccctatgtttccgctcaactcataacatattgatatacatttataattttcatgaatatttatatttagaattcataattatgaattatattaaatagattagaaacattttgatatcttttaaatacatttgttacatgtaatccttaaaataaaatgaacttcatagaatagtatccaaatgtgctttttttggataacggcacttattgatatattcatgaagattataatcacaagggaatacataatgaaaagaaaagttctggcaatgctggtcccggcgttattagttgctggcgcagcaaatgcggctgaagtctataataaagatggtaataaactggatttgtacggaaaagtagtgggtctgcactacttctctgatgattctggcagcgatggcgacatgtcatatgcccgtatcggtttcaaaggtgaaactcagatcgctgatcaattcactggttatggtcagtgggaatttaacattggcgcaaacggtcctgaaagcgacaagggtaataccgcaacgcgtctggcatttgcaggtttaggctttggtcagaatggtactttcgactatggtcgtaactacggtgtcgtatatgacgtagaagcatggaccgatatgctgccagaatttggtggcgatacctatgctggcgctgacaacttcatgaacggtcgtgctaatggtgttgcaacctaccgtaacaatggcttctttggttaggtcgatggcttgaactttgctttgcaatatcagggtaataatgaaagtggtggaccattcgggcaggaaggttccggtagtggtgatggccgtagcctttccaaagaaaatggtgatggtttcggtatgtcaacatcctacgacttcgacttcggtttaagtctgggtgctgcatatcaaactctgatcgttcagatcgtcaggttggagttggtttaaatgatcgtaaccatagcaacagaaatgctggtggtgaaaccgctgaagcatggactgttggtgcaaaatatgatgctaataatgtgtatttagcagctatgtacgctgaaactcgcaatatgaccccatatggtggtggcgagtttgataatggtgaatcaagatcagccatcgctaacaaaacccaaaactttgaagttgttgctcagtatcagttcgactttggcctgcgcccgtccatcgcttacctgcaatctaaaggtaaggatttaggcggttgggctcatgacggcaacggcgacccacgttacaccaataaagatctggttaaatacgttgatattggtgcgacctactacttcaacaaaaacatgtccacctatgttgattacaaaatcaacctgctggacaacgacgatgacttctacgaagcaaacggcatcgctaccgatgatatcgttgctgtgggcttagtctaccagttctaatcagtcaactcgctgcggcgtgttactgtaaaactgaacactagcctgagttcgtccctcatcgaactcaggcttttttattggcatttcatctccatctgcggcacacgcaattgccgaagcatatcgatacagcaccttaccctgcccctcctggcacaataacatcaaccagctactcttcaagctaacacccaaatgcatttctttatgaattaatccgtaacaaacacgcttcccatatagaaatatttgcaaaaatagtgcatgaaataagctttttctctaccaatccgggatataaatattcatcagcaccacaatattccacagcactaaatctctccccgccaccccgtacctctgataatggtctaaaatcattgaagccacttgcgacgacgttgctcaataaggaaaatttggcgtgaataatattcaacaccagtgcagcatcatcattacatacttacagccgccgactaccgctttcgatatattgactcaattttccagcctggttaaaaatagcgaccagctcagtcgcaaatatagtgactaccctaactaagcaacaataaggaatacactatgactgttcaaacaagtaaaaatccgcaggtcgatattgctgaagataatgcattcttccctagtgaatatagccttagccaatataccagtcctgtctctgatcttgatggcgtggactatccaaaaccttatcgcggtaaacataaaattctggtgatcgccgcggacgaacgttatttgccgaccgataacggaaaactgttcagcaccggtaaccatccgattgaaacgttgctgccgttgtatcatctccatgctgcaggtttcgaattcgaagtggcgaccatttccggtctgatgaccaagtttgaatactgggctatgccgcacaaagatgaaaaagtaatgccattctttgagcagcataaaagcttgttccgcaatccgaagaaactcgcggatgttgttgccagcctcaacgctgatagcgaatatgcagcaatctttgttcctggtggtcatggcgcacttattggtttacctgaaagccaggacgtggctgccgctttacagtgggcaatcaaaaatgaccgttttgttatctccctttgccacggcccggcggcttttctggcgcttcgccacggcgataacccactgaatggttattccatttgcgcattcccagacgccgcagacaaacaaacgccagagattggctatatgccgggtcatctcacctggtacttcggcgaagaactgaagaaaatgggcatgaatatcattaatgacgacatcaccgggcgagtacataaggaccgtaaacttctcaccggcgacagtccttttgcagcgaatgcgttgggtaaactggcggcgcaggaaatgctggcagcttacgcgggttaatccctgttacgtttgaatgtaagcgcataatcaatcgcggccgcgttagtactcacgacgtggctgcgttttttcacggttaatttatggcgtactgaagccctatgttaatttctttgcggtaacgtaatccggaacacattatgcttattgagatagtgatacgtagcacttcccccatgcaattcggcaatcgctttgactaaagaaaggcctagtccctgacctacggaatgacggctattatctccccgccaaaatctacggaagagtttttcaggctcattaattttcgttccagggctggcgatatcaatattaagatagctgttggtatcaagaaaactggttatatgaatacggcttttttctgggctatatctaatggcattaacaataagattgcttaacattcgttgtagtaaaattttatccgcaaagatttgctgattgcactcgaccttaaagcaaatctctttctcgtcactaaggtattcaagatagtccaacaaattttcgacttccttattgagagaaaggctgtccagtttcaccaaaacattgtttttatctgccctggcaagaaacagtatgttctctgttaaccggctaatattttccagctcttcaatgtttccggcaattgttttttgatattcagcgatacttctggtttgactgagcgtaacctgattctgacccagtaatgcattaattggcgttctaagttcatgagcgagatcgtcagcaaactgacttagacgctcaaaatctttgactaaagcatgatgcattttattcaacgcctgcccaagaggttttagttctctcggtaatgcgctaacctcaacaggctctcggctatcgttataattcagcgcttccgttacaccactcaactttttgatctctcgtaatcccgttctgattaacagcggacttaatacactgcaaagtacaatggcgacaatgcaaattataatgctattaattttatactgttcaagcatgttatgtctggcactagccaatttagccacagtaaccgttaaacttgggctaacttcatcaatattaattcgtaaagcatctatctctgtatcattaataatgcttctgtaaatgccagctgcgctgattgtctcactagcaggtatgttatttaacatgccatcactgacatttgtccggttaacaattttattgatgctatcaccatgaataatcaagatatcctgactaacatccatcatccggttaaagtacacaggtaacgtatctggatttaccccatcaattaacaactgcttgatctgcgctgtccggttaatgagtgttgtatcatcgcgccatttcaactcacttgccaggccattatagagagtccagacaattccggcgccagcaacagacagtagcaatataaaaagcaaggttaaacggacggttatagatagtcttttcattatttttttaccgctacgaaactatagcccatcccccggattgtggcaattagcttttcaggaaaaggatcatcaacttttgcgcggagcctgcgaatggcgacgtccaccgtattggtatcactatcaaagttgattccccaaatttcactcgcaataaccgttctgggtataatttcgccagctctggaggccagtagccaaagtaactgaaactccttgcgcgtcagtgtaatactgatattgtccctgctcacactatgactaacagagtccattcttaagccgctgatttctaatgtactattcaaagcgtgatgttgccttaattgtgcccgaacccttgccagcaactcagaaaaactaaaaggttttaccagataatcatttgccccactgtccagccctctgactctgtcatcgacagaatcccttgcagtaaggcaaataacaggggtttgctttgctgttcttaacgtttgtaagatctgccagccatccatacccggaagcataatatccagaatgatcaatgcataatcatccttcagcgcaagataaagcccatctctgccatcagaaacggcatcgatgacataacccgcttcggaaagcccctgcgttacccattcctgggtcctttgattatcttcaataagtagaatcttcatgaaaataatatgccataaatcatatgttatagaaacagcctggttcattacaaaattgtaatgctgctgtaaggttaccctggacgctttttcgctatcctcaaaactcattcacatgacaaggatataaacatgttaaagcgttatttagtactcagcgtagcaacggcagcatttagtttaccttctttggttaatgccgcacaacaaaacattcttagcgtgcacattttgaaccagcaaacaggaaaacccgctgctgacgtgacagtcactcttgaaaagaaggcggataacggctggttacaacttaataccgccaaaacagataaggatggacgaattaaggcactgtggcccgagcaaactgcaactacgggcgattaccgtgtcgtatttaaaaccggggactatttcaagaaacaaaatcttgaaagtttcttccctgagatccccgttgaatttcatattaataaagtgaacgagcattatcatgtgcctttattacttagccaatatgggtatagtacctatcgtggcagttaatgcataaatatgtaaaagcagatctctgctactgttagggaggacactccctgacagattaacagtaaacggctcttgctggctaacgacaaaaaagtgtgatggcttatgaaaaagaatcaatttttaaaagaaagtgatgttacggccgagagcgtattctttatgaagcgtcggcaggtgttaaaagcactgggcatcagtgcaactgcactttctttgcctcacgctgcgcatgccgatctgcttagctggtttaaagggaacgatcgcccgcccgcccccgccggaaaagcgctggagttcagcaagcctgccgcctggcaaaataacctgccactgacgccagcagataaagtttccggttataataacttctatgaattcgggctggataaagccgatcccgccgctaatgctggtagcctgaaaaccgatccatggacactgaaaatcagcggcgaagtggcaaaaccattgaccctcgatcatgatgacttaacccgtcgcttcccgctggaagagcgtatttatcgtatgcgctgcgtggaagcgtggagcatggtggtgccgtggattggttttccgctgcacaaattgctggcgcttgccgaacctaccagcaatgcgaagtatgtcgctttcgaaacaatttatgcaccggaacagatgccaggccagcaggaccgctttatcggcggtgggctgaaatatccttatgtcgaaggattgcgtctcgacgaagcaatgcatccgctcacactgatgaccgtaggtgtttatggcaaggcgttaccgccacaaaatggcgcgccggtgcgactgattgtgccgtggaaatatggctttaaagggattaaaagcatagtcagtattaagctgacccgcgagcgtccgccaaccacctggaatctggcagcgcctgacgaatacggtttttacgccaacgttaatccgtatgttgatcacccgcgctggagtcaggctaccgaacgatttattggtagtggcggcatcctcgatgtacagcgccagccaacgctactgtttaatggttacgccgcccaggtggcaagcctgtatcgtggcctggatttgcgggagaatttctaaatgcgtctgacagcaaaacaggtgacatggctgaaagtttgcctgcatcttgccggattgttgccgtttctctggctggtctgggcgatcaatcacggtggactgggtgccgatccggtgaaagatattcagcattttactggtcgcactgcactgaaatttttgctggcgaccttgttaatcacccctctggcacgctacgcaaaacagccgttattgatacgcactcgccgcctgttaggattatggtgctttgcctgggcgacactgcatttaacaagttacgcattgctggagctgggcgtgaataatctggcgttattaggtaaggagttaattacccggccttatttaacgttaggtattatcagctgggtaattttgcttgctttagcgttcactagtacccaggcgatgcagcgaaaactcggcaagcactggcaacagttgcataatttcgtctatcttgtcgcgattctggccccaatacattatctgtggtccgtgaagattattagtccgcagccgctcatctacgctgggctggctgtactgcttttagccttacggtataagaagttgcgttccctttttaaccggttacgcaagcaggttcacaacaaattatctgtataacttcatattgccgacaaagtacgcgttatccctgccggatgtggcgcgagcgccctatccggcatacacagatcgcatcaggttatgtttcgtttgtcatcaacctcaaatcaccaaaataatttattttatttcaataagatagataagtagaactgagaaagccatgctctcgtttcctaagagttgttgcattttgctatatgttacaatataacattacacatcatatacattaactctggaggaaactgttttggcgattcgtctttacaaactggctgttgctttaggtgtctttattgttagcgctcctgcctttagccatggtcatcacagtcacggcaaacccttaacagaggtcgaacaaaaagctgctaatggtgtttttgatgatgccaatgtacaaaaccgaacgctcagtgactgggatggagtctggcaatccgtttatcctttactgcaaagtggcaaacttgaccccgtctttcagaagaaagcggatgcagataaaactaaaacatttgctgaaattaaagattattatcacaaaggttatgcaacagatatcgagatgattggcattgaggacggcattgttgaattccatagaaataatgaaacaacaagctgtaaatatgattacgatggatacaaaatactcacctataaaagtggcaagaaaggcgttcgttacttattcgaatgtaaagatcctgaaagcaaagcccctaaatatatacaatttagcgatcatataattgcaccacgaaaaagttctcattttcacatttttatgggtaatgatagtcagcaatctttattaaatgaaatggaaaactggccaacgtattatccatatcagttgagtagcgaagaagtggtcgaggaaatgatgtctcattgagtattctcatgataacgcctcgatgccgctttagtaagttatcataactgccactggtccatccacaaacgccactgaacgcaagctagctacagacacgctcatcactatgacgtgtctgtatattaataagctaacccgcattgagttaaccaataacggattccatacacaatacggccaacagagaaagatacctgtgctcacgccattgcttatattggctggttacaatatgcactatcaattttttaaataacaaattattaaaaccacatctgtataaggaatttttaaggttcgtgggatagcttgactgtgaaaatcacaggagctacaaaaatgaaccgattcagtaaaactcaaatttatttacattggataacgctgcttttcgttgcaataacctatgccgcgatggaactccgtggctggtttcctaaaggtagtagtacttatctgctgatgcgagaaacacattacaatgcgggtatattcgtttgggtgttaatgtttagtcgcctgattataaaacaccgttatagtgatccttctattgtgccaccgccacctgcctggcaaatgaaagcggctagcctaatgcacatcatgctttatataaccttccttgcacttcctctgctggggattgctttgatggcttacagtggaaaaagctggagtttccttggtttcaatgtgtctccctttgttaccccaaacagcgaaattaaagcactgataaaaaatattcacgaaacctgggcaaatataggctactttttaatcgcagctcacgctggcgcagcactctttcatcactacattcagaaagataatactctgttacgaatgatgcctcgccgcaaataagtcgatccccttacaaggaaatgtgaaccatggacatcaacgcgtcataaatgtttacgcaagtgcacaatgcaccctttccactatcaacaaggaggagcagaaactgtgtaaatcgtacaatggtaagacttatcaaaaatacaggttaattttggtatttaaaccttttttacttgttagtatgatacaaaggctttcaaaaaagctgcgaaattcaacaactcttggaaattatggactttgtcccgcggctttaatctgacggccgcgttccttttttgactcaattattgaacccttctctacgcaacttcagttcccaccaccaactttgcggcagtttcataggatgaatgtctaaaagaataatggtgagcgataagaaaacgactgaataactgcacattttcgctcgaaagcttcctgtcagatccatagcgaatcaagtgctgaatgtcacagtatcgaacagaaaacagtgacgatctaacccttcaagaatattctacgattgttctgtttaggaaaagaaaggcgggaagtcgggagataagtcattgataaaggttcagatggttgccatgatgccaggaaatttggcattttaacagtccctgtccgtgcaattttgttcaagtgacgagtttgcgagcaaaacgatgattaagtggccctggaaagtacaagaaagtgcacatcaaactgcccttccctggcaggaagcactaagcatcccccttttaacgtgtctgacggaacaggaacaaagcaaattagtcactcttgccgaacgttttttacagcaaaagcggcttgttcctttacagggctttgaactggatagtttaagaagctgccggatagcacttctattttgcctacccgttctggagttaggactggaatggctggatggttttcatgaagtcttaatttatcctgcgccatttgtggtcgatgatgaatgggaagacgatatcggtctggtgcataaccaacgtattgttcagagtggtcagagctggcagcaagggcctatcgttttgaactggttggatatacaagattcttttgatgcttctggttttaacctgattattcatgaagtcgctcataagctggacacccgtaacggcgatcgcgccagcggagttccctttattccgttgcgtgaggttgctggctgggaacacgatcttcatgctgcaatgaacaacattcaggaagaaatcgaattggttggcgagaatgcggcgagcattgatgcttatgcagccagcgatcctgctgaatgttttgccgtactttctgaatatttctttagcgccccagaactttttgctcctcgtttccctagtttgtggcaacgtttctgccaattttatcaacaagatcctttgcagagactgcatcacgctaatgatacagacagctttagcgcgacgaatgttcattaattaacaactttgcagattaattaaccaattgaaatgacttatgaaatttagtgttgacagacaaggtaccgctaagtaatattcgccccgttcacacgattcctctgtagttcagtcggtagaacggcggactgttaatccgtatgtcactggttcgagtccagtcagaggagccaaattctaaaaattcgcttttttagcgcaatgtcactgaccttagttgaacattgttttttaacggatagcgggttttaacatcttaagcgccctcgacctttatggttgagggcgttttgctatgaacgccatcaccattttcccctcgattataaaacttgagttattcagtagtctcccctcttgcaactcacacccaaaactgcctaacgaaaagttattaattttcaatcatattgctatcagtatttacattttttcgctgtgctagaaagggcgcatttatgttagctcgtagtgggaaggtaagcatggctacgaagaagagaagtggagaagaaataaatgaccgacaaatattatgcgggatgggaattaaactacgccgcttaactgcgggtatctgtctgataactcaacttgcgttccctatggctgcggcagcacaaggtgtggtaaacgccgcaacccaacaaccagttcctgcacaaattgccattgcaaatgccaatacggtgccctacacccttggagcgttggaaagcgcccaaagcgttgccgaacgtttcggtattagcgtggctgagttacgcaaactcaaccagtttcgtacgtttgctcgaggttttgataatgtccgccagggtgatgaactggatgtcccggcacaagttagtgaaaaaaaattaaccccgccgccgggtaatagcagtgacaacctcgagcaacagatagccagtactagtcagcaaatcgggtctctgctcgccgaagatatgaacagcgagcaagcggcaaatatggcgcgtggatgggcctcttctcaggctagtggcgcaatgacagactggttaagccgcttcggtaccgcaagaatcacgctgggcgtggatgaagattttagcctgaagaactcccagttcgattttctccatccgtggtatgaaacgcctgataatctctttttcagtcagcatactctccatcgtactgacgagcgtacgcagattaacaacggcttaggttggcgtcatttcactcccacatggatgagcggcatcaacttctttttcgaccacgatcttagccgttaccactcccgcgccggcattggcgcggagtactggcgcgactatctaaaattaagcagtaacggctatttgcgactgaccaactggcgcagcgcacctgaactggacaacgattatgaagcacgcccggccaatggctgggatgtacgcgcagaaagctggctacccgcctggccgcaccttggcggtaaactggtctatgaacagtattatggcgatgaagtggccctgttcgataaagacgatcggcaaagtaatcctcatgccataaccgctggacttaactatacccccttcccgctgatgaccttcagcgcggagcaacgccagggtaaacagggcgaaaatgacacccgttttgccgtcgattttacctggcaacctggcagcgcaatgcagaaacagcttgacccgaatgaagtcgctgcacggcgtagccttgcaggcagccgttatgatctggtggatcgcaacaacaatatcgttctggaatatcgcaaaaaagaactggttcgcctgaccctgacagaccccgtgacagggaagagtggagaagtgaaaagtctggttagcagcctacaaaccaaatatgccctgaaaggctataacgtcgaagccaccgcactggaagctgccggtggcaaagtggtcacaacgggtaaagatattctggttaccctgccggcttaccggttcaccagtacgccagaaaccgataacacctggccgattgaagtcaccgccgaagatgtcaaaggcaatttgagcaatcgtgaacagagcatggtggtcgttcaggcacctacgctaagccagaaagattccagcgtaagcttaagtacccaaacattgaacgcggattcccatagtaccgccacactgacttttattgcgcatgatgcagcaggtaatcctgttgtcgggctggtgctcagcacgcgtcacgaaggtgttcaggacatcaccctttctgactggaaagataatggtgacggaagctatacccagatcctgaccacaggagcgatgtctggcacgctgacgctgatgccacagctgaatggtgtggatgcggctaaagcccccgccgtggtgaatatcatttctgttagcagttcccgaactcacagcagtattaagattgataaggaccgttatctctccggcaatcctatcgaggtgacggtagaactgagagatgaaaatgacaaacctgttaaggaacaaaaacagcaactgaataacgcagtcagcatcgacaacgtgaaaccaggagtcactacagactggaaagaaaccgcagatggcgtctataaggcgacctataccgcctataccaaaggcagtggacttactgcgaagctattaatgcaaaactggaatgaagatttgcataccgctggatttatcatcgacgccaacccgcagagtgcgaaaattgcgacattatctgccagcaataatggtgtgctcgccaatgagaatgcagcaaacaccgtcagcgtcaatgtcgctgatgaaggaagcaacccaatcaatgatcataccgtcacgtttgcggtattaagcggaagcgcaacttccttcaacaatcaaaacaccgcaaaaacggatgttaatggtctggcgacttttgatctgaaaagtagtaagcaggaagacaacacggttgaagtcacccttgaaaatggcgtgaaacaaacgttaatcgtcagttttgtcggcgacagcagtactgcgcaggttgatctgcagaagagcaaaaatgaagtggttgctgacggcaatgacagcgtcacaatgaccgcgaccgtccgggatgcaaaaggcaacctgctcaatgacgtcatggtcactttcaatgttaatagtgcagaggcgaaactgagccaaaccgaagtgaatagccacgacgggatcgccacagctacgctgaccagtttgaaaaatggtgattatagggttacggcctctgtgagctctggttcccaggctaatcaacaggtgaattttatcggtgatcaaagtactgctgccctgaccctcagtgtgcctagtggtggtatcaccgtcaccaacacagctccgcaatatatgactgcaaccttgcaggataaaaatggcaacccactaaaagataaagaaatcaccttctctgtgccaaacgacgtcgcaagtaagttcagcattagcaacggaggaaaaggcatgacggatagtaacggggttgcaatcgcctccctgaccggcacgttagcgggcacgcatatgatcatggctcgtctggctaacagcaatgtcagcgatgcacagccaatgacgtttgtggcggataaagacagagcggttgtcgttttgcaaacaagcaaagcggaaatcattgggaatggcgtggatgagacaactctgacagcaacagtgaaagatccgagcaatcatccggtggcggggataacggtaaacttcaccatgccacaggacgttgcggcaaactttacccttgaaaataacggtattgccatcactcaggccaatggggaagcgcatgtcacgctgaaaggtaaaaaagcgggcacgcatacggttaccgcaacgctgggtaataacaataccagtgatagccagccggtaacatttgtggcggacaaagccagcgctcaggttgtcctgcagataagtaaagatgagatcacaggtaatggcgtcgatagcgcaacgctaactgcaacggttaaagatcagttcgacaatgaggtgaataatcttccggtaacattcagcagtgcctctagtggactcaccctgaccccgggagtaagtaataccaacgagtctggcatcgcgcaggccactctcgcaggcgttgcctttggtgagaagacggttactgcaagtctggctaataatggtgccagcgacaacaaaactgtgcattttattggcgacacagcggcggcaaaaattatcgagttggcgcctgtcccagacagcataatcgccggtaccccgcagaacagctccggcagcgtcatcaccgccacagtcgttgataataatggctttccggtgaaaggtgtgactgtgaacttcaccagcaacgcagcgacagccgaaatgacgaacggcggtcaagccgtgacgaacgaacagggtaaggctaccgtcacttataccaatacccgctccagcatagaaagtggagcgagaccggataccgttgaggccagtctggaaaatggtagctccacgcttagcacaagtattaatgtcaacgctgatgcgtctacggcacatctcaccttgctacaggcactttttgatacagtctccgcaggcgagacaaccagtctgtatattgaggtgaaggataattacggcaacggtgtcccccagcaggaggtaaccctcagcgttagtccaagtgaaggcgtgacccccagtaataacgctatatatactaccaaccacgacggcaatttttacgcaagctttaccgctacaaaagccggggtttatcaattgacggcaaccctcgaaaatggcgatagcatgcaacaaacagtgacctatgtgccgaacgtcgcgaatgctgaaatcacgctggcagccagcaaggatccggtgattgccgacaataacgatctcacgacactaacagcaacagtcgctgatacagagggcaatgcgatagccaacactgaggtaacatttactctgccggaagatgtgaaggcgaacttcacgctgagcgatggcggtaaagtgattactgatgctgaaggcaaagcgaaagtcacgctgaaaggtacaaaagcaggcgctcatactgttacagcaagcatgactggcggtaagagtgagcagttggtggtgaactttattgcggatacgctcactgcgcaggttaatcttaacgttaccgaggacaattttatcgctaataacgtcgggatgaccaggctgcaggcaacagtgactgatggaaacggcaacccgttagccaatgaggcggtgacattcacgctaccggcagatgtgagcgcaagctttactctcggacaaggcggttccgccattactgatatcaacggcaaggctgaagttacactgagcggtacaaaatccggcacctaccccgtgacagttagcgtgaacaattatggtgtcagtgatacgaaacaggtgactttgattgccgatgctggtaccgcaaaactagcctccttaacctctgtatacagtttcgtcgtcagcacgaccgagggcgcaaccatgacggcaagcgtcactgacgctaacggcaacccggtagaaggcataaaagttaatttccgcggaacctccgtcacgctaagcagcaccagcgttgaaacggatgatcggggtttcgctgaaattcttgtgacaagcaccgaggtcggactgaaaacagttagtgcctctctggcagataaacctactgaagtcatcagccgattactgaatgccagtgcagatgttaattctgcgacgattaccagtctggagataccggaaggtcaggtaatggtcgcacaagacgtagcagttaaagctcacgttaacgaccagtttggcaacccggttgcgcatcaacccgtgacattcagtgcagagccatccagccaaatgatcatcagccagaatacggtctctactaatacgcagggtgtagccgaggtcaccatgacgcccgaaagaaacggtagctatatggtgaaagcatccctgccgaatggagccagtcttgagaaacaactggaggctattgatgaaaaactgacactcacggcgtccagtccgcttatcggtgtctatgcccctacaggcgctactctgacggcaacgctaacctctgcaaatggcactccagtggagggtcaggtcatcaactttagcgtaacgccagaaggggcgacgttaagtggcggaaaagtgagaactaactctagtggtcaggctccagtcgttttgaccagcaataaagtcggtacatatacggtgactgcatctttccataacggcgtaacaatacagacacagacaaccgtgaaagtcactggcaacagtagcaccgcccatgttgctagctttatcgctgatccaagcactatcgccgccaccaacactgatttaagtaccttaaaggcaacggttgaggatggcagtggtaacctgatcgaaggtctcactgtgtacttcgccttaaaaagcggctctgccacattaacgagtttaacagcggtgaccgatcaaaacggaatcgcgacaacaagcgtgaaaggagcgatgacaggtagcgtcacggtaagcgcagtcacgaccgctggtggaatgcaaacagtagatataacgctggtggctggcccggcagacaccagccagtccgtccttaagagcaatcggagtagtctgaaaggggactataccgatagtgctgaattacgtcttgttctgcacgatataagtggcaatccgatcaaagtttctgaagggatggaatttgtgcaaagtggtactaacgtgccctatataaaaattagcgcaattgattacagtctaaatatcaacggtgattacaaagccactgttacaggaggcggagagggtatcgcaacgctgatccctgtattgaatggtgttcatcaagctggtctgagtaccacaatacaattcactcgcgcagaagacaaaataatgagcggtacagtaagtgtcaatggtactgacctaccgacaactacattccctagccaggggttcaccggggcgtattatcagttgaataatgacaactttgccccaggaaaaacggcggctgattatgagtttagtagctctgcctcctgggtcgatgttgatgctaccggtaaagtgacatttaaaaatgtcggcagcaatagcgaaaggattacggcgacgccaaaaagtggaggccctagctatgtatacgaaatccgtgtgaagagttggtgggtgaacgccggcgaggctttcatgatatacagccttgctgaaaatttttgcagcagcaatggctacacgctccccagagcaaactatttaaaccactgtagttcccgaggcatcgggagtctgtacagtgaatggggagatatggggcattacacgactgacgctggttttcaaagtaatatgtattggagttctagtcccgcaaacagtagcgaacaatacgtagtttccctggcaacaggtgatcaaagcgtatttgaaaagcttgggtttgcttatgcgacatgttataaaaacctgtgattttccgttataatttcttaaagagtgttccattcggggcactcttttttacattccctctacagaactagcccttctctcacagaaaatgaataaataaaaatgcggcaccgccagaatcgcgttcgatgtgactatgatcattttcggtgagtactgctttgatctaaaggctggttttctgtgatgattgaccagcctcagagtattgatgacaccaccgttcataacagatcggcattactatgcataagtactgtctcatattctcgccaaaacactttttaatgcctttgcgaattcatccagacttatattgtcaattttttgcccaacgacgactgactccgagacatcggccattgcgggccatcgcgttttgtaatcagcataaattgcaacaacaggggtattataggcacttgccatatgtaatattgaggtgtcaggagttattgcgatataagcatcttttatgattgctgctgaacgtttaatcgagggtggtaaggataaacggtagacattattataacaatccactaatgccctggctttatcttcacctttgggtccatgaacgatcactattggtatatctgtttcactttaaatttttgctattagattttctgcaatcgataatgaaaatgtacgttcctgcgagctaccttctaaattgaacgcaatgtaagatcctaacgatcgcatttcctcgcgcacctcatcgagtacatcctcacttagtggcaattcatatattggcctgactgctggaaaacccgcctcacgcatcataaatgcccatgtcataggtacgggagcccggagtttctgatccatactggacgcgttcttgcacaaaggggagaagcaattcatggttataccaacaacctgaaaattcgtttttgctttcaactgactgataaataacatcgttttcaggttctttttacgcatcccctcaatgcaaagatccggcgtaccgtattgctgtgttatgttctttgctaaatcttttatttcttttaatgttgcgtgatcctgcatagtcattgtgactaatgttaatttagtctgttcaagtttaagcgcattaaagacttctaaattaattgtcgacgttacaattaaaagatgcttaattttatgcaattcaagcgcccgaataacaggaaagatggccatagcatcgccaatctgatcgggaatatggatgacaacaaagtctgttttttcaatattgaaattataagctttataatcgtagtaactaaatgcaatacgtctcaacaatgatgctaaaaacatacctaacctcgcctccctactggttataatgcaatgcagtctatcagactcatcagggtgccattttgtgcatatgcggacttttatgtttcatatctctaacctgtgggtcctctgcttaatccttaaacaacaccagcaactcctgcgctttcatcttccatcgaatttttcatgttgccgctaatcagccataaaatcatttgcagatgcgctctgtcgaggtagtctcataaggttcgtttatagatcgacggcaatgtgagttaccttttccatactaattataaaaagacagtacaaacaggatcattatggactccacgctcatctccactcgtcccgatgaagggacgcttagcttaagtcgcgcccgacgagctgcgttaggcagcttcgctggtgccgtcgtcgactggtatgattttttactctatggcatcaccgccgcactggtgtttaatcgcgagtttttcccgcaagtaagcccggcgatgggaacgctcgccgcatttgctacctttggcgtcggatttcttttccgtccgctcggcggtgtcattttcggtcactttggcgaccgactgggacgtaagcgcatgttaatgctgaccgtctggatgatgggcatcgcgacagccttgattggtattcttcctagtttcagcaccattgggtggtgggcacctattttgctggtgacactgcgtgccattcagggatttgcagtcggcggcgaatggggaggcgcggcgttgctttccgttgaaagtgcaccgaaaaataaaaaagccttttacagtagcggtgtacaagttggctacggtgtaggtttactgcttagtaccggactggttagtttgatcagtatgatgacgactgacgaacagtttttaagctggggctggcgcattcctttcctgtttagcatcgtactggtactgggagcattgtgggtgcgcaatggcatggaggagtccgcggaatttgaacaacagcaacattatcaagctgccgcgaaaaaacgcatcccggttatcgaagcgctgttacgacatcccggtgctttcctgaagattattgcgctacgactgtgcgaattgctgacgatgtacatcgttactgcctttgcacttaattatagtacccagaatatggggctaccgcgcgaacttttccttaatattggtttgctggtaggtggattaagctgcctgacaattccctgttttgcctggcttgccgatcgttttggtcgccgtagggtttatatcacaggtacgttaatcggaacgttgagcgcatttcctttctttatggcgcttgaagcacaatctattttctggatagttttcttctccataatgctggcaaacattgcgcatgacatggtggtgtgtgtgcaacaaccgatgtttaccgaaatgtttggtgccagttatcgctatagtggcgctggagtcggttatcaggttgccagtgtggttggcggtggatttacaccttttattgccgctgcactcatcacttactttgccgggaactggcatagcgtcgccatttatttgctggctggatgcctgatttccgcaatgaccgctttgttgatgaaagacagtcaacgcgcttgatagcctggcgaagatcatccgatcttcgccttacacttttgtttcacatttctgtgacatactatcggatgtgcggtaattgtatggaacaggagacacacatgaataataagggctccggtctgaccccagctcaggcactggataaactcgacgcgctgtatgagcaatctgtagtcgcattacgcaacgccattggcaactatattacaagtggcgaattacctgatgaaaacgcccgcaaacaaggtctttttgtctatccaagtctgaccgtaacctgggacggtagcacaaccaatccccccaaaacgcgcgcatttggtcgctttacccacgcaggcagctacaccaccacgattactcgccctactctctttcgtagctatcttaatgaacaacttacgttgctgtatcaggattatggtgcgcatatcagtgtgcaacccagccagcatgaaatcccttatccttatgtcatcgatggctctgaattgacacttgatcgcagtatgagcgctgggttaactcgctacttcccgacaacagaactggcgcaaattggcgatgaaactgcagacggcatttatcatccaactgaattctccccgctaagccattttgatgcgcgccgcgtcgatttttccctcgcacggttgcgccattataccggtacgccagttgaacattttcagccgttcgtcttgtttaccaactacacacgttatgtggatgaattcgttcgttggggatgcagccagatcctcgatcctgatagtccctacattgccctttcttgtgctggcgggaactggatcaccgccgaaaccgaagcgccagaagaagccatttccgaccttgcatggaaaaaacatcagatgccagcatggcatttaattaccgccgatggtcagggtattactctggtgaatattggcgtgggaccgagtaatgctaaaaccatctgcgatcatctggcagtgctacgcccggatgtctggttgatgattggtcactgtggcggattacgtgaaagtcaggccattggcgattatgtacttgcacacgcttatttacgcgatgaccacgttcttgatgcggttctgccgcccgatattcctattccgagcattgctgaagtgcaacgtgcgctttatgacgccaccaagctggtgagcggcaggcccggtgaggaagtcaaacagcggctacgtactggtactgtggtaaccacagatgacaggaactgggaattacgttacagtgcttctgcacttcgttttaacttaagccgggccgtagcaattgatatggaaagtgcaaccattgccgcgcaaggatatcgtttccgcgtgccatacgggacactactgtgtgttagtgataaaccgttgcatggcgagattaaacttcccggccaggctaaccgtttttatgaaggcgctatttccgaacatctgcaaattggcattcgggcgatcgatttgctgcgcgcagaaggcgaccgactgcatagccgtaaattacgaacctttaatgagccgccgttccgataataagttctgaaccttcttatcagaaatagatgtgaaggagtaagtaagacacctggcaaatagcctgcaataatcgtgggctgtttgcttccttgggcggatacgagttttattatcgtcttaatgatttccacatattaaaagcaagtatgctttcaaaacacaattataaaaaatcccgccaacaatataagtttttataaaattaaatataagattatggctttagaatatttttatttctaatagacgagatttttcctgttatgatataatatgctgaattaacacatgttaacgatttaccagtaatgtaaataaattttcgaggagatcattccagtgggacgtaaatgggccaatattgttgctaaaaaaacggctaaagacggtgcaacgtctaaaatttatgcaaaattcggtgtagaaatctatgctgctgctaaacaaggtgaacccgatccagaattaaacacatctttaaaattcgttattgaacgtgcaaagcaggcacaagttccaaagcacgttattgataaagcaattgataaagccaaaggcggcggagatgaaacgttcgtgcagggacgttatgaaggctttggtcctaatggcagtatgattatcgccgagacattgactagtaatgttaaccgtacgattgctaacgttcgcacaattttcaataaaaaaggcggcaatatcggagcggcaggttctgtcagctatatgtttgacaatacgggtgtgattgtatttaaagggacagaccctgaccatatttttgaaattttacttgaagctgaagttgatgttcgtgatgtgactgaagaagaaggtaacattgttatttatactgaacctactgaccttcataaaggaatcgcggctctaaaagcagctggaatcactgagttcagtacaacagaattagaaatgattgctcaatctgaagttgagctttccccagaagatttagaaatctttgaagggcttgttgatgcccttgaagatgacgacgatgtacaaaaagtttatcataacgtcgcaaatctctaattatcttttaaagaaatctgtctttacggcagatttctttaatctcatataattcttataaaaaatataatattcaactcgtcatattgattatacccccccgttcccagagaaataatatttattaaaattccagttcttctttttctgattacagaaggcaaagtggcaattacgcatagtttcccgataaagacgcgatagcgacatcccgcataaggcatttttctctttatctttgtacggtacttcatggaacagagtttttgaccttgcgaatcgtgatgtctgttggggagggacaatttgctcactgaagcgtgagactcgattaagcgcacgaaacacagaaatcaaaaaacccggtcacttttttacaaggtaaccgggtaaaaataatttttattttttaactgttttgagactcatagagatgtctcaaaactaaaatttggctcctctgactggactcgaaccagtgacatacggattaacagtccgccgttctaccgactgaactacagaggaatcgtgagaacgaggcgaatattagcgatgcccacccacaatgtcaaagcctgttttttaaatttgaaatcgtttgctgaaataatctgcattttgtcgtttattcgctcacaactggctttttttcacacttttgcggctcgggtcgagggtatttccatagccaacgtccagtaaccattcgccagtaaaacagcacggcccgcacagcccagtcggcaaacattcccatccagacaccaaccacaccccagccaagcatgattcccagcacataaccgactacaacccgacaaccccacatgctcaacatgctaacccacatggcgtaacgggcatcacgagcacctttaaatccagcgggtagcacccaactggcggaccaaataggcataaataaagcatttagccaaatcagaatcacaacgacatgtttaacctgtggatcctgggtgtaaaagcttgccataaccccggcaaagggagccgttagccaggcgatggccgttaatccaagagtggaaagccagaacacatgccgcaactgaatctctgcttgcgctatctgccctacccccaaccttcggcctgtaatgatcgtagaagcagagccgagcgcacttccgggtaagttgataagagccgcaatactaaacgcgataaaatttccggcaataacactggtccccatcccggcaacgaacatttgggttaataaccgaccactggtaaataacacactttcgacactcgcgggaataccaatccccatgacttcccagataatgctaaaattcagcggtttaaaatagctctttaagctaatccttagcgcaggattaaaaccaatcgccagcacccacaaaattgcaactgcgccaatataacgagaaatggttaaacccagccctgccccgacaaatcccagtcccggccaggagaaaaggccgtaaatcaatatgccgctaataataatattaagaatattcaggctaccgttaatcaatagcggtattttcgtattccctgcaccacgaagtgccccgctaccaataagagtgatggcagctgctggataactgagtaccgtcagctccagataagtcaacgccagtgctttaacttctgtcgtggcatcacccgcgacgaaatcaataatttgttcgccaaaatgatgaataagcgttgccaacagtacggcaaacaacgtcatgatcaccaaactctgccgcgtcgccaccctcgctcgtcgtcgatcccgcttaccgagactaaatgccacaacgacagtagtaccaagatcgatagcagcaaaaaaagccataatgaccatattgaagctgtccgccaatcccacgccggccatcgcatcttttcccagccagctgaccagaaaagtgctcagaacccccatcaacaggacacaggcattctccatgaagataggaacagcaagcggggttatctcgcgccagaacaacactttgtagctcttgcgtttagcgtgccagcgagtgccgtgaacaacctggcgtaaagcagaggagatattcaaagcgctccttaattgcagaaagtgaaaccacatttcaaataaactgggagaatcagcaaagctgcaaagattttcgccaacaaattgtctgcaaatgcaacaaactgtacttagaaacggcaaacagttggggaatttaaaaatcgggttactcaaaagatttttcgccgttaagatgtgcctcaacaacgattcctctgtagttcagtcggtagaacggcggactgttaatccgtatgtcactggttcgagtccagtcagaggagccaaattcctgaaaagcccgcttttatagcgggatttttgttatatctgataatcaatttcctcttcactgctttccatcacctgccgcttgatatcctcaacactcagtcctgcattacaaagttccagaaagcgccagacatagttacgctgaagttgtcctcgcttcagtcccaaccagacagtattagcatcaaaaagatgccgcgtatccaggcggattaaattctcttcctcttgttcgccactggattgctcggcaactaatccgatcccaagcccaagagcaacataggttttaatgacatcagaatcctgcgcacttaatacaatatctgccagcaaacctttgcgggcaaatgcgtcatcaatacgactgcgccccgtaatcccctgtcggtaagtgattaacggccacttcgctatactttccagcgtcaatggactaatttgcgtcaagggatgatcgtgtggaacaagcaaactatggtgccaacgaaaccacgggaaggcgacgagctgcgggtcattactcaaacgctcgctggcgataccaatatcagcttcgccattttgcaacaatgtcgcaatttcctgtggcgtcccctggattagctcgagccgaacctccgggaaaagttcgcgaaaagctttaatgacctctggcaagctataacgtgcctgagtatgcgtcgttgcaatagtgagaacgccagacgtatcgttggtaaacaggtctgcaagccgacgaacattactggcttcattcagaatacgttctgcaatgaccagtaatgctttgcccggttcagtcatgcccagcagtcgcttacctcgtcgaacaaatatttcgatgccaagttcatcctccagttcccgaatatgacggctgacgccactctgactggtaaaaagcatattcgcaacctctgtcaggttgtaatcctgacgtgcagcctcgcggattatctttagttgttggaaattcacggtaaactccgggcagttcagatttcccgttattgttaaagtctaatgcccggcataacaaataataaaaacccgcatcttattccatcccgatataacacttagctcaccaattgccactgccttttttccatcactggagaactaatcacactcattaacaactctttcactgcctgtgcctgtgggcttaagttcgctctggcgggtaaatttaaactcaaagagagactcatggaaggagtggtaatgcgactcatccacccatttactgcgccacataagctacgcgcggcgctttcgggtaatactgcaacgcccatgccgctggcaatcgctgcggtaagcgtggcaatagactcaatttcaccaataacttttgccgtgagtcgccgtagggaaaaagcctcatcaacacgaagtctaatagcactgtaatcactggggagaaagaggttcatttgcgcaatagcattcacatcaacgctttgccccgggcaatcttgagttcctaccagaaaaagatcttctttcagcaaagcctgactggatacaccagccacaggggaatgctcataaatcaccgccatatcgagttggtgatttatcaatttttcgttaagcactgcaccactattttcatgaagatagataacgatctccggaaattcagcgcgaaccgcctgtaataagggcatggtgatggaactcgcagcggttcctggtgcaaagccaatgctgacttgcccgcttaatgcctgaccaacgttatgcaccgccagttgggcctgttcacactgacgtaaaatggcccgcgcatgggtatagagaatttttccggcgtctgttggtgtaacgccccgctttgtacggatcaaaagttgttgatttaactcaccttccagtgtggcaacctgctggctgagcgctggttgtgcgatatgcaatacttcagcagcctgggtcaggctaccaatatctacaatttttacgaagtatttcaggcgtctgaagttcatgttgcctccggtttttaagaatcggcccaagtgccgccattacttacaaccagattgcaagatgcttgccagttttattttggtgttgatgtacaagctaaccaactgtcaaataagagattatgatagattcgtcatttgctcctttaatcagctgtcgcgttcccctgccctataaaaggagggtatgcaccacgatggttcattacccaataagattgaaagctcaccactttgttgaaattgacagcaaacaaacaaaaaaatgcatttcaccctttgacatcaccatgcactgccattaatatgcgccccgttcacacgattcctctgtagttcagtcggtagaacggcggactgttaatccgtatgtcactggttcgagtccagtcagaggagccaaattcaaaaaagcctgctttctagcaggctttttgctttctaattaccaacgctcttaaaacatctgtctactaccagaactaatttgcacaggcattccgcttcgacgttgcaacgcagcatttgcgcgatttacatcaacttcttgcccgttgataaacgcccgcaaagatggggttaccggcaatggcacttttcggtcagactcatattctgcacgattgcggctcaatggctcatgaacttccagccagttgctgccatctggttcagtggtgtattttactggctggtcgataatttgcacacgcgtcccaacaggaacattatcaaacagatatttgatatcgtcattgcgcagacgaatacagccctgacttacccggagcccaataccaaaattggcattggtaccatggatggcatacaacctgccaatataaatcgcgtacagccccatgggattatcggggcccgcaggaacaaatgcgggcaaactctcccctcgtttcgcatattcgcgccgagtgttcggcgttggcgtccaggttggagcttcttgtttacgttcaacggtagtcacccagttacgcggggtttctcgcccagcctggccgataccaataggaaagacttccacagtattactgtctggtgggtagtaataaagacgcatctcagcgacgttaacaacaatccctttacgaacagtgtcgggcaaaatcagttgctgcggaatggtgagttggctgccagacttcggcaaaaaaacatcagcgcccgggttcgcttccagcatgttacttaacccttgcccgtattgtgcggcaaaagtctccagcggctgggtattgtgatcaggaacagttacagtaaagctctgccccactaaacggctaccctctggaggtaatggataagttaccgccaggctagtatggctggcaaaaagcagagcaaaactgcaaagaatatttacacgacgcatcatgtccctttcctatgtcgcgaaagctatccgttaagtatagcttttatcagacttttcgtttttaactgttcaaatcagaagtcgtattccccggtagaacaatattactggcagcaagttcgcccatgttgttgtatatcgcacaggcagcttcgatgatgggcatcgccagagctgcgccactcccctcacctaaacgcatctccatattgagataaggctccagccccaaatggctgagcgctatacgcgcgcctttttctgcgctcaggtgagaaggaatgagatacggtttgatcgcaggagacatctggcaggctgcgagcgcagcagcataagaaagaaatccatccagcaacacgggtaaaccgcaggaagcagcacctaacatcactccagctattccgaccaaatcaaatccacccacttttgccaggacatcaacaccatcctgaggatttggttgattcaacgtaatcgcccgacgcacaacatcaattttattagccagtttatctgtcggcaggtttgcgccaatcccaaccacttcttcaggatcccggccagtgattgtgctgactattgctgctgccggtgtcgtgtttgccatccccagttcacctacaccaaacagcgtgacaccgttttttgccagctcctgcgtataacatatgacgtccaaaagcaacttttcagcctgacggcgactcattgccggagcactagcaatattgccgctacctcgtgcgacacgcatgttgataagcccggggataggctcagcagtatcaataccaacatcaattacgtggacgttagcgcccgcttgttctgccagcacacacacgccggttgttccacgggtcatattttcagcctgtatggctgtcacttcttttggagaaatagcgaccccttcctcccagacgccgtgatcggcacacataaccagtaccgcttttttgcccacatgcggtatgccattcaaccccggcattcctgccagttgtatggcaagcacctccagctttcccaggctaccaacaggtttgagtaacccgtcaatatgccgttgtgcacggctcatagcggtagaatcgatggctgggatcgtattcagtaaatcggcaagtatttgcatctcacgtctctttatagcagtgccagcaggaagaccagttcaccaagctctatggctgctcccagcgtatcgcccgtttgcccgcccagcgtacgtttgagaagctgaccgaggatgaaaatcgccaccatcgtcaccaccatagcagccacaccatgcatacccggcaataatacggcagcaaaaatagcggctaagccgagtgtgacgcaggtttgtcgcccatcaattttgccaatgaacacattgccaagcccttcttcccgcgcataacgatgacgatacatcaataatgcggcagtcccgcggctgaccgcacatgctgccgccaggcttgcaaggatgctttcgccacgcagagccaactcgcttaacaccagaatctttgccagtaccacaaaaatcaatgccagaccgccgtgggtgcctaaacggctatcacgcatgatttccaacatgcgatcgcggctacgtgcagaaaatacgccatcacaggtatcagcgaggccgtccagatggaatcccccggtcatcagcaccagcacaagtacgctaaacagtgccgccagtggtgcgccacaccatgcctgcagcaccatgaagaccagcccgctaatcgcgccaagcaataatccaatcaaaggaaaagtaataataccgcgagaataatgctcgaaatccagtccctgggaccagcgacgcggtacaggcagacgcgtaataaaactgagcatcgcccaaaataatttactcatttgatttttactccaataccgctaaccaccagccatacttcatttgccgcagcggccaactgctgatttacccgcccggcaatatcacgaaaatgtcgtgccagacgactctccggcacaatccccattcccacttcgttagtcactaatacaacctttgcggggcaacgttggcaggcagcaatcaagctctgaatctcagcattaatcgcctgttccatcgcctgataatcccattcatcagggtctttatcgccgccataatcaaacaacagattagtcaccattgtggtaacgcattcaagcaacacaacctcattcgggttaatgtctgcatgaattaattcatcaagatgttgccagcgctccactgtgcgccagtgctccgggcggccttgccgatgatgttctatccgtgcagccatctcatcatcaaggatttggctggtagcgatatacagaacctgactagagtccccaataagcgcctctgcgtggcgactcttcccgctccgtgcgccccccgtcaccaaaatcatcataccgactcctgattcaaatgtatgatggtattcattgaacagaacaatggatcccccaccgttgctgaccgcaaaacatttacgcgattaatactgcgcgtaatataattaaaaatccagcattctcaatccattacgaaataagatggcattacggaatagccagactttctcgtgttaacgtccgacaaaatgcgtcattgacagcggtttctgtggattgacacatttcattcagataatgaattaatgctactgccggaacaaccagcaaacgggcattgtgttctgaaatccaggctattgattcaacgtcagcgacagatctgcgctgtaaaagaacttgtaaaacaacgtaatagaattatccggaatggtggcgactatgcactagggaaggtgcgaataagtggggaaattcttctcggctgactcagtcatttcatttcttcatgtttgagccgattttttctcccgtaaatgccttgaatcagcctatttagaccgtttcttcgccatttaaggcgttatccccagtttgcagaaactccgtaatgagattaaaagcgctcataactcatctgtcggccagaaggcgcgcctctgaattatccgacggacaaaccgggaacagtgtaatttcccggcaggagcgaaaaaattgaaaggcgcatcttactcttttcgctttcaaaaaaaagagtggtcatcgcgttaacacaccgccctgagatgaattagtgatgttttggctgcaccgcaacatacatttcgatatcccagtacccatcttccgcgccattgttcaaataaacctcgaagcagggctttggtaacatttcataagcactgtcctgcaagagactattaaagaactgataccagggtttagcaaaatcatcaccgactacacgagctaccgccaccgcatactgaccacctgtaatttctgtcagaatgacgccctcactgttttcgggaagcgtaaagtaacccggcaccgtcacgacggtgtcgcagcgtaatttttcggcgggtgtttcatctggattgtcgtaatagacagcaacccactccttcggcacaatatttttgctatctacccacatcatcaactgctcaaagcctttctttaccgtctgttcccacgggccaacgagatggaaacctgcaacggtacgtttctcttcctgcttaatctcgtagttcatgacgcctccattgatactgtttttatatacagtatagttgcaaaattaaaaccacaaggaatgagtgttgattatgcgagcagactcgcactcctgccagtctgctgcaaaagaaaggtcaggccttatggtggaaataatcactcaggcgagaaaacatgctgccttccccgacagattccagggtaaccagcggccagtgcgccacctgtttatcacggtcgtaaagttcaatttcccctacccgctgatgggcgctaattggcgcggtgagttctttaccatcaagggtatatttggctttgatatgtggaatttcggctttcggtagcaccatccagaactcttgttccgttcccaggtcgatattttctttatcgccataccagatgcgttccgttccgacctttttcccacggtgcaaaatttgcaccgtagtaaagttttgttgcccccaacgcagtaattttcttgcctcttcctcacgaccttttgcactgtcagcccccattaccactgcaatgagacgacgctgcccatctacagcgctagcaatgagattaaacccggcaccagaagtatgacccgttttcaggccgtcaacattcatggttttatcccacaacaacccgttacggttttgctgggtgataccgttccaggtgagacttttctcactgtacatatgataaaactcgggctcgccgtggatgatagcacgagaaagcacagctaaatcataagcgctgctatgctggccaggtgcatccagaccatgcactgtttcaaaatgcgtatccttgagatgcagcttctcggcatagttgttcatcatttcaacaaactgccgttgcccaccggcaatatagtcagccagagcaacacaagcgtcatttccggaatccacaattaaaccacggcttaaatcacgtacgcttacgcgatcgccctctttcaaaaacatcagactagaaccgacaaacaccggattatctttcgcccacgcatcgcgccccacggtgacaatatcgtctggcgtaatgcgatgactatcgatagcgcgatccacgacataacccgtcatcagctttgtcaggctggcgggattgcgctgttgatgctcattacccgcggtgaggatctgaccggtggtgtaatccatcaatacccaggacccggcatgaatctctggaggctgaggactaaaaggaatgttttccgccgcaaaaccagagcttaagttaaaaacgaacaaagaagcagcaataataagacggcgtttcaacagcaaaccctcaggagtttcaaatagctgttctttttacggaaatacttatgaactggctggaataaagtgcaagaaaatgtgactaccctctcatttttatctgacatgatctgttgccactcgctgccaaattgtggcgctaaagctgattagcacggtgatatttgatactctggcagacagcagaaataacggatttaacctaatgatgaatgacggtaagcaacaatctacctttttgtttcacgattacgaaacctttggcacgcaccccgcgttagatcgccctgcacagttcgcagccattcgcaccgatagcgaattcaatgtcatcggcgaacccgaagtcttttactgcaagcccgctgatgactatttaccccagccaggagccgtattaattaccggtattaccccgcaggaagcacgggcgaaaggagaaaacgaagccgcgtttgccgcccgtattcacagcctttttaccgtaccgaagacctgtattctgggctacaacaatgtgcgtttcgacgacgaagtcacacgcaacattttttatcgtaatttctacgatccttacgcctggagctggcagcatgataacagccgctgggatttactggatgttatgcgtgcctgttatgccctgcgcccggaaggaataaactggcctgaaaatgatgacggtctaccgagctttcgccttgagcatttaaccaaagcgaatggtattgaacatagcaacgcccacgatgcgatggctgatgtgtacgccactattgcgatggcaaagctggtaaaaacgcgtcagccacgcctgtttgattatctctttacccatcgtaataaacacaaactgatggcgttgattgatgttccgcagatgaaacccctggtgcacgtttccggaatgtttggagcatggcgcggcaataccagctgggtggcaccgctggcgtggcatcctgaaaatcgcaatgccgtaattatggtggatttggcaggagacattagcccattactggaactggatagcgacacattgcgcgagcgtttatataccgcaaaaaccgatcttggcgataacgccgccgttccggttaagctggtgcatatcaataaatgtccggtgctggcccaggcgaatacgctacgcccggaagatgccgaccgactgggaattaatcgtcagcattgcctcgataacctgaaaattctgcgtgaaaatccgcaagtgcgcgaaaaagtggtggcgatattcgcggaagccgaaccgtttacgcctagtgataacgtggatgcacagctttataacggctttttcagtgacgcagatcgtgcagcaatgaaaattgtgctggaaaccgagccgcgtaatttaccggcactggatatcacttttgttgataaacggattgaaaagctgttgttcaattatcgggcacgcaacttcccggggacgctggattatgccgagcagcaacgctggctggagcaccgtcgccaggtcttcacgccagagtttttgcagggttatgctgatgaattgcagatgctggtacaacaatatgccgatgacaaagagaaagtggcgctgttaaaagcactttggcagtacgcggaagagattgtctaatttgaagcctccgccgctggtacggcggaggacaatgttgagtcaggctttttgaacggtgatgctccacgctgcatcgccaatctgctgataatcggtgatggcatgtccttcttctgccgcccactgtgggattgcttcagttgcctgggtgcaatcaaactcaatcactaactcatcgccgctgaccatttctgccagagctgcttttgcttctatgagtggaaacggacagacctgcgtcaccacatccagctttttaatcaccatctttacaccttacttaatttgccgcagcagttgccagtcgcgccttacgctgcggtcgaacatacacaagccaggacgcagtccagactccgagaatcataaatacaaggccaatccagccctgccaggtcatcattgcagtcataaccagtccattaccgatagagcaaccacctgcaatactggcaccgaagcccatcagtacaccacctaacccgctacgtaatgttgtttgtgcatcagctgcgcgaacgcggaactcacggctcgctttggctgcaataaaactccccacgaagatccctaacaccaggaaaacgccccagttaatgtatttcatgtcacccgcgaccagaaattgcagaatattggccgttggggaagtgattcctaacccaaacatgcgtccggttgcttcactcaggggccaggctaaaagcgcaatcaaaccgatgagtacagctgtgacaaagggatgccagcgtttttcaaacagaatatgagcgatcccggttcggcgcggcggtaaggtcgcgactttgagttttggcttcttcaactctttcatcaccacccagagcgttatcaccagcaaaacggcaaccaacggccacacagacaaattaaaagtctcagcaatagagttatgttcagtactgtagtgctgcaaggtttgatttaaaccactggcatgtggagaacgcatcaccgcactcatcaccatataagtgaaaagcgcgatccaactgccgatcaatccctcacccgcgcgataccaggtcccggtggcacatccacccgccagaacaattcccagcccgaagatatacccacctataacagtaccaagccacgggaacgccccggcttcgtaagtcagtaggcccgcctgaattaacgcaaaaacccccacgctttgtacgctaattgcaatcagcaaggcgtaaaacatgcgattatttttcacgatatacatatcgcgaaaaccacctgtcaggcaaaaacgcccacgctgcatgacaaatcccagcagagcaccacaaattagcccgcttaatatcatactaaacataaattaattaaccagatgaatgttaatgaggaaattattcatgactggtggaatgcagaccaataaccaaattctctaaattagaacaaatggttattaatgaggagttcgatacaaaagaataaaaaaaccggagccaaatgttcattcgactccggtttattattagaaaagatgattatgctacgtcttcgtactgcggaaccggattacggaagctcttggtgacgcaagccaggtaaatcagaccgatagcagcccagatcagacccagaaccatactgctttcttccaggttaacccacagcgcaccaacggtcagcgcaccacacatcggcaggaacagatactggaagtgatctttcagcgtcttgttacgcttctcacggatccagaactggctgatgacgctcaggttaacgaaagtgaacgccaccagcgcaccaaagttaatcagcgccgttgccattaccaggtcgaagttgattgccagcagggcaatcgcgccaaccaggatgatgttcatcgccggagtacgccatttcgggtgtacataaccgaagaagcttttcgggaatacgccgtcacgacccattacgtacatcagacgcgctacgcctgcatgcgccgccataccggacgccagtacggtaatggtggagaagatcagcgcgccaacctggaacgctttacccgcaacgtacagcatgatttcaggctgactcgcatccggatctttaaagcgagagatatccgggaagtacagctgcaggaagtaagttgcaaagatgaagatcatgccgccgatcagcgcggtcaggaaaatcgcacgcgggatcacgcgctctgcatctttggtttcttcgctcaggttgctgatgccgtcaaagccggtaaaggagaagcacaggattgtcgccccggtaatcatcgggataacatgcgcatcgccagaccagaatggacgagtgctcgccagcgtaccagcgccttcaccttcaaatacgccataaacaaccatgcccagaatcaccgcgatcagcactacctgcaacacgacgattacagtgttgaagttcgctacggatttcagactacgcaggttaaaggcggtcataaaggccaccagcgccaccacaaacatccagcttgggatggaaggcaccagagcttcaaaatagattttcgccagtagaatgttgatcatcggcgcgaacagatagtcgagcagagaagaccaacccaccataaagccgacagtcgggctaatggatttctgggcgtaagtgtatgcagagccagcagaaggatagcggcgaaccagcttcccgtagctcagagccgtaaacaggatcgcaatcaatgcgaacgcataggctgtcggcacatgaccatccgtgaggccactaacgataccaaaagtatcaaacagcgtcatcggctgcatataggcaagacccatcattacaaccggaactaacgtaagcgttttacgcaattccacgcgagaggtgtttggagtaacgttatggctcatggtcattctcctttacggtgataaccgtcgcgtaagcaaaaaattgccccatttttttggattcctcagcgacaacaactgtcgatttttagtaaatatctatccggtacgaagcccggcctcttggtatgaatgattggtttgaagcaaaaaataaccgacgctgatgaaacgtcggtttttagtcattttttgacagcggcgcattgtgcctaaatgggggggaaatgacaagagaatgagaggcttgtcagaataatttttctttaaatggcactttttccgtcatcagattttgcataaacaccggcgatcgcactatttgctaaaatttcatcccgccaccagccactggcaagtcctgcggtctgttcgttccagccaatccagacgggttcaaagagagtttgggcgaccactttcttctcgattaacgcgccactatcgagaaaacgttgcgccagataacggggtaaatagccgcagccgaggccgctaatttgcagctccagtttggttttaaaatcgaaaacggtaatggcttcttgttcgtcgagaagttgacttgccgtagaagcgcctgcctgcgcagtatcccccaccacaatcgcccgatatcgcttaataatacgacgatttaacggctcttcttccagggctaacggatgatgaggcgcgaccgcaaagacttgttccagatcgcccaaccgactaaaaccaaactcactggaagatggtggctcatgcatcgcgccaacaataatatccgctcgcccctgagtcagggcatcccaactaccaccgagtacgccattgataaacttcaggcgcgtcacgctatgatgttgataaaaagcttcaatgagtggcgcaagcagagaaaaaggaaacgtgtcgtccacgccaatcaccagctcgttttcccagccttcatgcagtttgatcgcctgcttttccagttcccgcacggtatgcagaacttcccgccctttctctaataacatttttccggtgcgggtgaatttagcgcggtgtccgctacgatcaagcaattgaatattaaggtcgctttccagcttgtgaacggtgtaactcagagcggacggcgtcttgtagagtttggcgctcgccgccgcaaaactgccttctttttctaaggcatcgaggatcatcaacacatccagcagtggtttcatacacgcccccttgcagtgcatgcggcgtcctgctggcgtgatcgtttactccagcggcattaccagcggatcgggatactggtattcaaatcccagttcattacaaatccgactgccatcaataatcttacctttgccgctgtccagactatttctgaactgcggaggttccagccccagtaaacgggccatctgcggatagaaaacattacgcgcagggtgagctggcgcacatatattatagatgtgtccgcctttaggtgcctgtaacaacagagtgatagcgccaataacatcttctaaatggactaaattaacaccatgttcaccatcaggcgcggtttttccggcaaagaagcgtccgggatgacgtcccggtccgaccaggcccgcaagacgcagaatatcgacgctagtaccgggtaaattgtgcagccagtcttcgagttcttctaatactcgtccactgttggttactggattacgcggggtggtttctttcaccgtgccttgcgcgtcgccatagacagatgtactgctggtaaaaataatgcggggaatacgatgggccagcgcgctatccactaactcttgtaccgcttgtaaatagaactcatcgccggggccgctacgacgtgccggaagcgtaatgaccagcgcatcggcatccatcagggcatccagatcgtcagaatcgcaaactagctcaggctccatgcgaagcagatagctatcaatgccactcattcgggccgcttcgacaccatcttgtgtggttttactcccggtgacttgccagcctcgcgcactaagactcatcgccagcggcatgcctaaccaccctaacccgacaattgcgacctttttcatccgttatctcctgatacaccttagatctataaggctacgctagcgtatcaaaactgacaattcattctatgaatgaatctgttcaataatgataacgacatgctgcaatgagcagactatcgtcggtaaccgcgtataccagacggtgctcctctgtaatgcgtcgggaccagaaaccactcaaattatgtttcaggggttctggcttccccttaccttcaaatggcgttctgcgggtatctttgataagttcattgatctttttaacaattcgcttatctgtttcctgccagtacagataatcgtcccaactttcctcagaccagattagtttcactcaatgatgtccttttccgttcctttgccacttttcaggctatcgatactgtccatcaatctccgggcgttagcgggggagcgcagtagataagccgtctcttccaggctgttgtattcttcgagactcatcagaacacaagcctctccattctgacgagtaataaggatcggggcatgatcttcaacggctttcatcattgttgcgctcaaattctgacgcgcttcgctgtagctaattgtacgcatgtcaatctcctcttttgtacagttcattgtacaatgatgagcgttaattaactatttattaattagtttgtagatcaaggtattgtcagtgagacgaaaatccaggcttcgctatttttggtgccatcagctaagaggacagtcctcttagccccctcctttccccgctcattcattaaacaaatccattgccataaaatatataaaaaagcccttgctttctaacgtgaaagtggtttaggttaaaagacatcagttgaataaacattcacagagacttttatgacacgcgttcaatttaaacaccaccatcatcaccatcatcctgactaatctttcaggcgatgtgtgctggaagacattcagatcttccagtggtgcatgaacgcatgagaaagcccccggaagatcaccttccgggggcttttttattgcgcggttgataacggttcagacaggtttaaagaggaataacaaaatgacagacaacactcgtttacgcatagctatgcagaaatccggccgtttaagtgatgacagtcgcgaattgctggcgcgctgtggcattaaaattaatcttcacacccagcgcctgatcgcgatggcagaaaacatgccgattgatattctgcgcgtgcgtgacgacgacattcccggtctggtaatggatggcgtggtagaccttgggattatcggcgaaaacgtgctggaagaagagctgcttaaccgccgcgcccagggtgaagatccacgctactttaccctgcgtcgtctggatttcggcggctgtcgtcttagcctggcaacgccggttgatgaagcctgggacggtccgctctccttaaacggtaaacgtatcgccacctcttatcctcacctgctcaagcgttatctcgaccagaaaggcatctcttttaaatcctgcttactgaacggttctgttgaagtcgccccgcgtgccggactggcggatgcgatttgcgatctggtttccaccggtgccacgctggaagctaacggcctgcgcgaagtcgaagttatctatcgcagcaaagcctgcctgattcaacgcgatggcgaaatggaagaatccaaacagcaactgatcgacaaactgctgacccgtattcagggtgtgatccaggcgcgcgaaagtaaatacatcatgatgcacgcaccgaccgaacgtctggatgaagtcatcgccctgctgccaggtgccgaacgcccaactattctgccgctggcgggtgaccaacagcgcgtagcgatgcacatggtcagcagcgaaaccctgttctgggaaaccatggaaaaactgaaagcgctgggtgccagtagtattctggtcctgccgattgagaagatgatggagtgatcgccatgagctttaacacaatcattgactggaatagctgtactgcggagcaacaacgccagctgttaatgcgcccggcgatttccgcctctgaaagcattacccgcactgttaacgatattctcgataacgtgaaagcacgcggcgatgaggccctgcgggaatacagcgcgaagtttgataaaaccacggttaccgcgctgaaggtgtctgcagaggagatcgccgccgccagcgaacgcctgagcgacgagctaaaacaggcgatggcggtggcagtaaagaatattgaaaccttccacactgcgcaaaaactgccgccggtagatgtagaaacgcagccaggcgtgcgttgccagcaggtcacgcgtccggtagctagtgttgggttgtatattcctggcggctccgccccgctcttcagtacggtattaatgctggcgactccggcgagtattgcgggctgtaaaaaagtggtgctgtgcagtccgccgccgattgccgatgagatcctttatgcggcgcagctgtgcggtgtgcaggacgtgtttaacgtcggcggcgcacaggccattgccgcactggcgtttggtacggaatctgtgccaaaagtggacaaaatcttcgggccgggtaacgcctttgtcaccgaagcgaaacgtcaggtgagccagcgtctggacggtgcggcgatcgatatgcccgcaggcccgagcgaagtgctggtgattgctgacagcggcgctacgccggatttcgtggcttctgatttgctctctcaggctgaacacggcccggacagtcaggtgattttactgacgcccgctgctgatatggcgcgtcgcgttgccgaggccgtcgaacgccaactggcagaactgccgcgtgccgaaaccgcccgccaggcactgaacgccagccgcctgatcgtgactaaagatttagcgcagtgcgtggagatctccaaccagtacggcccggagcacctgatcattcagacccgcaacgcccgtgaactggtcgatagcatcaccagcgccggtagcgtatttcttggtgactggagtccggaaagcgcaggtgattacgcctccggcaccaaccacgttctaccgacttacggttacaccgccacctgttccagcctcgggctggcagatttccagaagcgcatgaccgtacaggaactgagcaaagaggggttctccgcgctggctagtaccatagaaacactggccgccgccgagcgcctgaccgcccacaaaaatgccgttactttgcgtgttaacgcccttaaggagcaagcatgagcaccgtgactattaccgatttagcgcgtgaaaacgtccgcaacctgacgccgtatcagagcgcgcgtcgtctgggcggtaacggcgatgtctggctgaacgccaacgaataccccactgccgtggagtttcagcttactcagcaaacgctcaaccgctacccggaatgccagccgaaagcggtgattgaaaattacgcgcaatatgcaggcgtaaaaccggagcaggtgctggtcagccgtggcgcggacgaaggtattgaactgctgattcgcgctttttgcgaaccgggtaaagacgccatcctctactgcccgccaacgtacggcatgtacagcgtcagcgccgaaacgattggcgtcgagtgccgcacagtgccgacgctggacaactggcaactggacttacagggcatttccgacaagctggacggcgtaaaagtggtttatgtttgcagccccaataacccgaccgggcaactgatcaatccgcaggattttcgcaccctgctggagttaacccgcggtaaggcgattgtggttgccgatgaagcctatatcgagttttgcccgcaggcaagcctggctggctggctggcggaatatccgcacctggctattttacgcacactgagcaaagcttttgctctggcggggcttcgttgcggatttacgctggcaaacgaagaagtcatcaacctgctgatgaaagtgatcgccccctacccgctcagcacgccggttgccgacattgcggcccaggcgttaagcccatagggaatcgtcgccatgcgcgaacgggtagcgtaaattattgcagaacgcgaatacctgattgccgcactgaaagagatcccctgcgtagagcaggttttcgactctgaaaccaactacattctggcgcgctttaaagcctccagtgcggtgtttaaatctttgtgggatcagggcattatcttacgtgatcagaataaacaaccctctttaagcggctgcctgcgaattaccgtcggaacccgtgaagaaagccagcgcgtcattgacgccttacgtgcggagcaagtttgatgagtcagaagtatctttttatcgatcgcgatggaaccctgattagcgaaccgccgagtgattttcaggtggaccgttttgataaactcgcctttgaaccgggcgtgatcccggaactgctgaagctgcaaaaagcgggctacaagctggtgatgatcactaatcaggatggtcttggaacacaaagtttcccacaggcggatttcgatggcccgcacaacctgatgatgcagatcttcaccagccaaggcgtacagtttgatgaagtgctgatttgtccgcacctgcccgccgatgagtgcgactgccgtaagccgaaagtaaaactggtggaacgttatctggctgagcaagcgatggatcgcgctaacagttatgtgattggcgatcgcgcgaccgacattcaactggcggaaaacatgggcattactggtttacgctacgaccgcgaaaccctgaactggccaatgattggcgagcaactcaccagacgtgaccgttacgctcacgtagtgcgtaataccaaagagacgcagattgacgttcaggtgtggctggatcgtgaaggtggcagcaagattaacaccggcgttggcttctttgatcatatgctggatcagatcgctacccacggcggtttccgcatggaaatcaacgtcaaaggcgacctctatatcgacgatcaccacaccgtcgaagataccggcctggcgctgggcgaagcgctaaaaatcgccctcggagacaaacgcggtatttgccgctttggttttgtgctaccgatggacgaatgccttgcccgctgcgcgctggatatctctggtcgcccgcacctggaatataaagccgagtttacctaccagcgcgtgggcgatctcagcaccgaaatgatcgagcacttcttccgtagcctcagttacaccatgggcgtgacgctacacctgaaaaccaaaggtaaaaacgatcatcaccgtgtagagagtctgttcaaagcctttggtcgcaccctgcgccaggccatccgcgtggaaggcgataccctgcccagcagcaaaggagtgctgtaatgaacgtggtgatccttgataccggctgcgccaacctgaacagcgtgaagtctgccattgcgcgtcacggttatgaacccaaagtcagccgtgacccggacgtcgtgttgctggccgataaactgtttttacccggcgttggcactgcgcaagcggcgatggatcaggtacgtgagcgcgagctgtttgatctcatcaaagcctgtacccaaccggtgctgggcatctgcttagggatgcaactgctggggcggcgcagcgaagagagcaacggcgtcgacttgctgggcatcatcgacgaagacgtgccgaaaatgaccgactttggtctgccactgccacatatgggctggaaccgcgtttacccgcaggcaggcaaccgcctgtttcaggggattgaagacggcgcgtacttttactttgttcacagctacgcaatgccggtcaatccgtggaccatcgcccagtgtaattacggcgaaccgttcaccgcggcggtacaaaaagataacttctacggcgtgcagttccacccggagcgttctggtgccgctggtgctaagttgctgaaaaacttcctggagatgtgatgattattccggcattagatttaatcgacggcactgtggtgcgtctccatcagggcgattacggcaaacagcgcgattacggtaacgacccgctgccgcgattgcaggattacgccgcgcagggtgccgaagtgctgcacctggtggatctgaccggggcaaaagatccggctaaacgtcaaatcccgctgattaaaaccctggtcgcgggcgttaacgttccggtgcaggttggcggcggcgtgcgtagcgaagaagatgtggcggcgttactggaagcgggcgttgcgcgcgtagtggtcggctccaccgcggtgaaaagtcaagatatggtgaaaggctggtttgaacgcttcggtgccgatgccttagtgctggcgctggatgtccgtattgacgagcaaggcaacaagcaggtggcagtcagcggctggcaagagaacagcggcgttagtctggaacaactggtggaaacctatctgcccgtcggcctgaaacatgtgctgtgtaccgatatcagccgcgacggcacgctggcaggctctaacgtctctttatatgaagaagtgtgcgccagatatccgcaggtggcatttcagtcctccggcggtattggcgacattgatgatgtggcggccctgcgtggcactggtgtgcgcggcgtaatagttggtcgggcattactggaaggtaaattcaccgtgaaggaggccatcgcatgctggcaaaacgcataatcccatgtctcgacgttcgtgatggtcaggtggtgaaaggcgtacagtttcgcaaccatgaaatcattggcgatatcgtgccgctggcaaaacgctacgctgaagaaggcgctgacgaactggtgttctacgacatcaccgcttccagcgatggccgtgtggtagataaaagctgggtatctcgcgtggcggaagtgatcgacattccgttttgtgtggcgggtgggattaagtctctggaagatgccgcgaaaattctttcctttggcgcggataaaatttccatcaactctcctgcgctggcagacccaacattaattactcgcctggccgatcgctttggcgtgcagtgtattgtggtcggtattgatacctggtacgacgccgaaaccggtaaatatcatgtgaatcaatataccggcgatgaaagccgcacccgcgtcactcaatgggaaacgctcgactgggtacaggaagtgcaaaaacgcggtgccggagaaatcgtcctcaatatgatgaatcaggacggcgtgcgtaacggttacgacctcgaacaactgaaaaaagtgcgtgaagtttgccacgtcccgctgattgcctccggtggcgcgggcaccatggaacacttcctcgaagccttccgcgatgccgacgttgacggcgcgctggcagcttccgtattccacaaacaaataatcaatattggtgaattaaaagcgtacctggcaacacagggcgtggagatcaggatatgttaacagaacaacaacgtcgcgaactggactgggaaaaaaccgacggacttatgccggtgattgtgcaacacgcggtatccggcgaagtgctaatgctgggctatatgaacccggaagccttagacaaaaccctcgaaagcggcaaagtcaccttcttcagccgcactaaacagcgactgtggaccaaaggcgaaacgagcggcaatttcctcaacgtagtgagtattgccccggactgcgacaacgacacgttactggtgctggcgaatcccatcggcccgacctgccacaaaggcaccagcagttgcttcggcgacaccgctcaccagtggctgttcctgtatcaactggaacaactgctcgccgagcgcaaatctgccgatccggaaacctcctacaccgccaaactgtatgccagcggcaccaaacgcattgcgcagaaagtgggtgaagaaggcgtggaaaccgcgctggcagcaacggtacatgaccgctttgagctgaccaacgaggcgtctgatttgatgtatcacctgctggtgttgttgcaggatcaggggctggatttaacgacggtaattgagaacctgcgtaaacggcatcagtgagttgcggggtaagcggatgcgatattgttgccgcatccggcaaaaaaacgggcaaggtgtcaccaccctgccctttttctttaaaaccgaaaagattacttcgcgttgtaattgcgtagagcattacgccccagcacaatccccgcgccaaccatgccacccagcagcaccgccagaatcaaggtaattgcctttttcgggctatcacgacgaataggtaacatcggtttcatcacataacggtaagcatgaatatcaagatcatcaacttttaagctttcgatatccagcaggttttgacgagtctgatagtagtttgggctgaacaccaacggacgggtcgcctcatgcttaatcatgctctccagcgcttcgctccccaaaaggaacaacgtatcttgtgtgatatcttcgccagtctgttgaatctgcggttttgtcacctgcgcctgattcgcatactgcaacgcttcctgaatctgacggatacgcagatctttctgctcctgcgcgactacttcctgcgttcttaaagagtcctgcaagtttttccgtcccagagcaatgttgtctttgagatccttttctagctcttgattcactttatcgtcaacttgctgaatgtattgggccaacttcatttgtgcgccctctgcagtttgcccaacataagaaacagtcaatggtaattgctggttcttaacagaaggttcgatggtaagtttttctcgttcttcctgattatccagcgtttctgctaatgcagagaaggcagaactgaagcgaccaattaacgtctcctgcaaatcgcttactttcggtgcagcctgaccatagataacattcatggcattgttatagccagcaatttgccccacgtcgggctgagtgataattgctgtactcgtccatttctccttcgctactgccaaatatccaatagccagggcaatagccacaatgacggaaatgatgattgtcatcttgccacgccacaactgcactagtaaatcaatcaaatcaatctgttccgggtcatggttttgcccagaaacattattattttctactctcatcattaccctaactgacggaaatttccaagtccgcatagtttagcgataatcctcgtgaatgctataggataagtgataaaaataatgaattgttgtgtaagtaacaaaagacaatcagggcgtaaatagccctgataacaagatgttagtcgctgccaaagagatcgcgggtgtataccttatctgccacatccttaagctcttctgccattcggttagagataatgacgtcggcttgttgtttgaaggtggcgagatcacgttccaggcgagagttgaagaaactgtcttctttcatcactggctcgtagatgatcacttcaacacctttcgccttgatacgtttcataatcccctgaatagaagacgcacggaagttatcactaccgctcttcataatcagacgataaatacccaccacttgcggcttgcgactcaaaatggcatcggcaataaaatctttacgcgtgcggttagcatcgacaattgcgctgatcaggttattcggcacagactggtagttcgccagtaactgcttggtatctttcggcagacaataaccaccataaccaaagctcggattgttgtaatggttgccaatacgtgggtcgagacaaacgccttcgattatttgacgggaattcagacctaaactttctgcatagctatccagttcgttaaagtacgccacgcgcatcgccaggtaggtgtttgcaaaaagtttaatcgcttctgcttcagtggagtcggtaaacagcatcgggatattttgcttaatcgcgccttcctgtaacagagcagcgaaacgttctgcgcgttcactacgctcaccgatgacaatacgactaggatggagattatcgtaaagggctttaccctcacggagaaattccggggagaatataatattttcagtgcgatatttcttatgcatcgctgcggtaaaaccaacgggaaccgtacttttgatgaccataaccgcataaggatttatctcaactacgtctttaattacactttctacactggatgtattgaaataattagttttaggatcatagtcggttggagtggcgatgatgacataatcagcatcccggtaggcttcatttttatctaatgtggcattaaagtgtattttatcactttgcaaaaactgctgaatttccttatcaacaataggagatatccgatcattcagcatagcaacgcgactcggtaaaatatctaatgccacaacctcatgattttgtgcgattagaagcccgttactcaagcctacatagccagtaccggaaatggtgattttcatttcatgctctcagaattaacttaactgtgaatcatgatgtttttagcatcctgataagagctaaaagttttaacgctacgttgttcgatggtcaacgcaacgaaaaacaattcagattttctttataagaatagctgatatttattaagttaatattaagcagtgaaatttagtctataagatatttggcaaaaaaaagcccggtgcaatatacgccgggcctcaattttattgttggttaaatcagattaatccagccattcggtatggaacacaccttctttatcaatacgcttataagtatgcgcaccaaaatagtcacgctgtgcctggatcaggttcgcaggcagaacagcagcacggtagctgtcgtaataggcaaccgctgcggagaaggtcggaaccggaataccgttctgtactgcataagcaacgacatcacgcagcgcctgctggtagtcatcggcaatttgcttgaagtacggagccagcaacaggttagcgatctgtggattttcggcataagcatcggtgattttctgcaggaactgcgcacggatgatgcagccagcacggaaaatcttcgcgatttcgccgtagttcagatcccagttgtactcttcagacgcagcacgcagctgagagaagccctgggcgtaagaaacgattttgcccagatacagcgcacgacgaactttttcgatgaactcagccttgtcgcctgctggctgtgcttgcggaccagagagaactttagatgcggcaacacgctgatctttcagagaagagatataacgtgcaaacacagactcggtaatcaggctcagcggttcgccgagatccagcgcgctctggctggtccatttaccggtacctttgttagccgcttcatccaggatcacatcaaccaggtagttaccgtcttcatcttttttggtgaagatatctttggtgatgtcgatcaggtaactgctcagttcaccgttattccactcggtaaaggtctgcgccagttcttcgttggtgaggttcaggccacctttaagcagagaataggcttcagcaatcagctgcatatcgccgtattcaataccgttgtgaaccatcttcacatagtgacctgcgccatcggcaccaatataggtaacgcatggttcaccgtcttcagctacggcggcgattttggtcaggatcggtgctaccaattcataggcttctttctggccaccaggcataatagaaggacctttcagcgccccctcttcaccgccagaaacaccggtaccgatgaagttaaagccctctgcactaagctcacgattacgacgaatagtgtcctggaagaaggtgttaccaccatcaatgatgatgtctcctttatcgagatatggtttgagggaatcaatagcagcatccgtgcctgcacctgctttcaccattaacaggatgcgacgaggcgtttccagagattcgacaaactctttcaccgtatagtaaggaaccagtttcttgcctggattttcggcaatcacttcttccgtcttctcacgggaacggttgaaaatagagacggtataaccacggctttcgatgttgagcgcaaggttgcgtcccatcactgccataccgactacgccgatctgttgcttggacattacatactcctgtcaggtgtgatcaccgcgctgaatgctcgcggcctggaatgttcgcaaataagtatacaaagtacttattaaagtataaatagcttatccatgcttatatgcttacggctttatatgtctccacatgcgatatttcttaaataatgttttattattaccacttttaattcagggataatgtgaggttattaccctcaaataatatgagataaatagtgctgcaacattgcatttttgccccgatttatccatgatcgaattgtgacatttgtcatacaacgaataggttttgtacttactatggaatggattgccgatccgtctatctgggccgggttaatcacgctgattgtgatcgaactggtcctcggcattgataacctggtctttattgccatcctcgccgaaaaactaccgccgaagcagcgtgaccgcgcacgggttaccgggctgctgctggcaatgttaatgcgcctgttactgctggcgagtatctcctggctggtcaccctgactcaaccgctgttcagcttccgcagctttacctttagcgcccgcgacttaatcatgctgtttggtggtttcttcctgttgttcaaagccacgatggagctgaacgaacggctggaagggaaagacagcaataatcccacacaacgcaaaggtgcgaagttctggggcgtggtgacgcaaattgtggtactggacgccattttcagtctcgacagtgtgattaccgccgtcgggatggtcgaccatttactggtcatgatggccgccgtggttatcgctatcagcctgatgttgatggccagcaagccgttaacgcaatttgttaacagtcacccgacgatcgttattctctgcttaagcttcctgttgatgattggctttagcctggtggcagaaggtttcggcttcgtcattccgaaaggctacctgtacgctgccattggtttcagcgtgatgatcgaggcgctcaatcagttggctatctttaaccggcgacgttttctttccgctaaccagacgctgcgccagcggactaccgaagcggtaatgcgcctgcttagcgggcaaaaagaagatgcggaactggacgccgaaaccgcgtccatgctggtggatcatggtaaccagcagatctttaatccgcaggaacggcggatgattgagcgggtacttaatcttaaccagcgtaccgtcagcagcattatgacgagccgccacgatattgagcatatcgatctcaacgcgccggaagaagaaatccgccagttgctggagcgaaatcagcatacgcggctggtggttaccgacggtgatgacgcagaagatttgctcggtgttgttcacgttatcgacctgctacaacagtctctgcgcggcgaaccgctcaacctgcgggtgttgattcgccagccgctggtgttcccggaaaccttgccgttgttacctgccctggagcagttccgtaatgcccgcacgcactttgcttttgtggtggatgagtttggcagcgtggaagggattgtgacattaagtgacgtcactgaaaccattgccggtaacttaccgaacgaagtggaagagatcgacgcccgccatgatattcagaagaatgcggacggttcctggacggcgaatggtcatatgccgctggaggatctggtgcaatatgtgccgctgccgctggatgaaaaacgtgaatatcacaccattgccgggctgttgatggagtatttgcagcgtattccaaaacctggcgaagaagttcaggtgggggattatttgcttaaaacgttgcaggtagaaagccatcgcgtgcagaaggtgcagattataccgctgcgtaaggatggcgagatggagtacgaggtgtgatggtatcggtcattttacccaatagccgaaaggaataagatgagggaaccgcgccatcggcgatttaccgccgggagcccgggttgccagggtggtggagattgagccaccctggcacgttcaccggcttgagcgttccatagtagcgaggaacatcaagtgaacggaacagccttcgatcttacatattcagaatataatgatgccgccacgaacgcctgatgcgacgctttacgcgtcttatcaggcctacaggactggtcacctggtaacttacatcttctccagcaacttcttcacatctttgccattacgggaatctttattccgctcggcccagtcattcaggcgacgtttcgcttcgtcctgtagatgtttgcgcagtaactgatccacttgcaggctgtaattgagttgctgccagttgccataaacccgcagcggtactggcgtttctttcaggaaatcaatcagtttgctttccccgttccagccacccacgacccgaatatcaaactgggtgtcgcaggtttgatctgccagattcaacatgccttcccctgtcagcgccagcacagggctttgaccttgcatgtcgtttaacgtcacgacgccatccttcaacgtcaaatcggtggtaaagcggtcaagccgcgtcacgttatcaaagttttcagcggccttcacatcaccgccattacgctctaccgcttgctgaatcatctgctggaagttcatcccttccatgcgcgtgtcggtcatttcgacatgtgcctgtccttgccagttgtggcggaatgcgtcggcatctatgtcagcaccggagaaatcaccagccagactcatttttccggtcaagctaatcggatagttaaacgccttcagaatggtaccaatctcaacgttttccagccgtggctggaagtttatccgcggatttatacttgtcgcgtccagcgtgcccggcagactaacctgtccaccgttaagtttgccctgcagttgagtaatttccagcaaaccgctcttgttggtcatttgcgtggcaacatctgtaaaattcattccgcgccagcgcacgttactggcctgcaacaaaatatcagccgtaaagccttgcagtccctgataggccggttcatcaatacggctagaaatgaccgggcgcggcaacgtactttggctctgcccctgctgcgcggcaccgttttcaccattcgcggtttcattaagcgggatgaggttgtcaagattcagttgcgggaattgcagcctcagctgccattccggtttctctgtcagcgtaacctgtgcttgcccgcttagcgtactatcattggcggtcaaactaatttggttaaaactaaggcgtttatgactctcctgccactgggcctggaaactcccctgcccctgaataccttgttttggtaaatcggcaccctgcaactgccagttaatttgttcaatagccgccgttaaatcatgcggataatcagaagcatctaccgtaccgttaagggatatcgtgagatcgcgctgatcgcgattaacccgcccggagaactcaaaactaccacgatgttggggatcttgttccatttgcaggcgaatattgcggattgtcacctgctcgtcatcttcatgctggaacaccagcacgctgtccgccaccttaagactggatatatcaaagctccatccgcgatcgtcactcagatccggcaaggtattgtcgcgcggtgcaaccggagcgtcttcactgcgcaccgcttccgtctgcggcgtcagttggatcactgccccttttagcatcacctgcttaacgctcagttgatgactcagtagtggtaaaagcgccacgtccagacgcatgttgtcggcgcgaaccagtggctggcttgcgccctgggcggtgagagacattcgcccggagaggatactaagctgcggccagacgtgccaacgcagtggcccgtcgagctgcaattgataaccgctacgtgcagcaacttgcttgaccatatagtcgcggaaatcattcggattcaccagcaacactaacgcagataacccggccaccagcacgaccaggagtatcatcagcgtcgtcagaaatcgtctcatggtatcctcaatgggcctgaattagtctttatcgattcggctggctaccgcgccctgctggttgcgatatttcgcatcttcacggcggttgtaaggtcgcaccgccgggccggaaagcggctcaaagctcagcgcaccaattaacatgcccggacgcagcgccagcggcagcttaccggagttgtagaactccagcacaatgcaaccagaccagcccggatcgatgcggtgcgcggtgacgtgcaccatcagccccagacgcgccagactggaacgcccgtccagccagcccaccagatcggctggcagcgtcacgctctccagcgtcaccgccagcgccagctctcctgggtgaagatagaacgcctcgccctcgtcgagaacgatctcatcgctcatcacgcggtcaagcgcggcgctcacttcatctttgggaccgctcagatcgataaacgctgccgtgtgaccacggaaggtacgaaatttattgcccaggcgtacatccaccgtcgcgccgttaatacgctccactggcggacgtgggttgatgctcaaacggccttcatcaagccaggcttcaatatctcggtcacacagacgcatggcattttctcctttcgcgcatcactcccttaacgccaattacgtcaagggcatactaggttatcactgaacggtacacaatttatcaagcttattcaaagaactgacttattttcgctttcaatatatcgatcgcgatgcggtttttcccgccgcgcggcacgataatgtccgcatattgtttagaaggctcaatgaattgcaggaacatcgggcgcacggttttttgatattgcgccatcacactatccatactacgcccacgctcgttaacgtcacgcttgatgcggcgcatcaggcagatatccagcggggtatcaacgaaaatggagaagttaagttcgtcacgcaaacgcgcatccgtcagcaacaaaatgccttcgagaatgatgaccttcttcggctcaaccgtcaccgtttctttcatacgcgtatgttcaacatagctgtaaaccggcaggtcaattgcgctgccgcgtttcaacgcttgtaaatgctcaagcagcagactgtgatccatcgcgctgggatggtcgtagttggtcttaacgcgttcttccatgctcagatggctttgatctttgtaatagcagtcttcgggaattacgccgatgtgttcatcaccgacttgctcacgcaattcacgataaagggtactggcaataagactcttgccggaagcgcttgcgccagcgataccgataatgacgcactgatgagactgatcagtcatatatttagcgacctgattaacctggatgttaggaagggggcgacgaagcgccaaacgcggcaattatagggatttcatccgtctgataccagtcgaatagcgttgccgcgcgctcagagttaattgttgacaaagaattcccgggggcaaattacgttgatcagttttatgtaaggtaaaaaatgttaaacgcagttgcgcaaattatccgcctttacgtcactttatgagcaattcgcatataaaatgtaaaacttttgtactagcataaacacagaaacgaatactggcgaccaggtcttgcggataaagcggtaatgagcaaacaaagtcagcatgtattaattgccctgccccacccgctgcttcacctggtcagtttaggtttagtcagctttatctttacccttttcagccttgagcttagccagtttggcacccaactcgccccactgtggttcccgacgtccatcatgatggtggcgttttatcgccatgccgggcgcatgtggccgggaattgcgctgagctgtagcctgggaaatatcgccgcatccatcctgcttttttccaccagcagcctgaacatgacctggacgaccatcaatattgttgaagccgtggtcggggcagtgctgctacgtaaattgctgccgtggtataaccccttgcaaaatctggctgactggctgcgtctggcactcggcagcgccattgttccgcctctgttggggggtgttctggttgtcctgctgacgcccggagacgatcctctcagggcatttttgatatgggtactgagtgaatccatcggcgctctggcactggtgccgctgggattgttatttaaaccacactatctgctgcgccatcgcaacccacggttgctttttgagagcctgctcacgttagccatcacactgacgttaagctggcttagcatgctgtatctgccgtggccttttactttcattattgtgctgttgatgtggagcgccgtgcgtctgccacgaatggaagcctttttgatcttccttaccacggtgatgatggtgagcctgatgatggccgcggatccccccctgcttgctacgccgcgtacgtacctgatgagccatatgccgtggctaccgtttttgctgatcctgctgcccgccaacatcatgaccatggtgatgtatgcctttcgtgcggaacgcaaacacatttccgaaagcgaaacccactttcggaacgcgatggaatattccgctatcggtatggcgttagtgggcaccgagggacaatggctgcaaaccaacaaagcgctctgccagtttctcgggtacagtcaggaagagctgcgcggactcacctttcagcaactgacctggccggaggatctcaataaagatctccaacaggttgaaaagctgataagcggtgaaataaacacctatagtatggaaaaacgctactacaaccgcaatggcgatgttgtctgggcgttgcttgccgtcagtctggtgcgccacacggatggcacgccgctctattttatcgctcagattgaagacattaacgagctaaaacgcaccgaacaggtcaatcagcaactgatggagcgcatcactctggctaacgaagcgggcgggattggcatctgggagtgggagttgaagccgaatatttttagctgggataagcggatgttcgagctgtatgaaattcctccacatatcaaaccgaactggcaggtgtggtacgagtgcgtgctgccggaagatcgccagcatgccgaaaaagtgattcgtgatagcttgcaaagtcgcagcccctttaaactggaatttcgcattaccgtaaaagacggtattcgccatatccgcgccctcgccaaccgggtactgaataaagaaggcgaagtcgaacgtctcctcggcatcaatatggatatgaccgaagtgaaacagcttaacgaggcattgtttcaggaaaaagagcgcctgcacattacgcttgattccatcggtgaagccgtggtctgtattgatatggcgatgaaaattacctttatgaatccagtggcggagaagatgagcggctggacgcaggaagaagcgttaggtgttccgctcctgacggtgttgcatattacttttggcgacaacggaccattaatggagaacatttacagtgccgacaccagtcgttccgcgatcgagcaagatgtggtgttgcactgtcggagcggcggcagttacgacgtgcattacagtattacgccgttaagtactctggacggcagcaatattggtagcgttctggtgattcaggacgttaccgaaagtcgcaaaatgctgcgccagctgagctacagcgcctcccatgatgcactgacgcatctcgccaaccgcgccagttttgagaaacaactgcgtatcctgctgcaaacggtaaacagtacacatcagcgacatgccctggtgtttatcgatcttgatcgctttaaagcggtgaatgacagcgccgggcatgcggcgggtgacgctttgctgcgcgaactggcgagcttaatgctgagtatgctgcgttccagcgacgtgctggcgcgactcggtggggatgaatttggtctgctgctaccagactgtaatgttgaaagcgcgcgttttatcgctacacgcattatcagtgccgtgaatgactatcactttatatgggaaggccgtgtgcatcgggtaggtgccagtgccgggattaccttgattgatgacaacaatcatcaggcggcagaagtgatgagccaggctgatatcgcctgttatgcctccaaaaatggtggccggggccgggtgacggtttacgaaccgcagcaagctgccgcacatagcgaacgggcggcgatgagccttgatgaacagtggcggatgattaaagagaatcagttgatgatgctcgcccacggtgtcgctagcccacggatcccggaagcgcgtaatttgtggctgattagtcttaagctctggagttgcgaaggcgagattattgatgaacaaacatttcgtcgtagcttcagcgatccggcgcttagccatgctcttgaccgccgggtattccacgaatttttccagcaggccgcaaaagcggttgccagtaaaggcataagcatctccctccccctttccgttgccggtttgagtagcgccacgctggtgaatgatctgcttgagcagctggaaaatagccctctaccaccacggttattacatctgattattccggctgaagcgattttagatcacgcagaaagcgtgcaaaaactgcggctggcgggatgtcggatagtgctcagccaggtgggccgcgatctgcaaatcttcaacagcctgaaagcgaatatggcagattacctgctacttgatggtgagttatgcgccaacgtgcagggtaatttgatggatgagatgctgattacgattattcaggggcacgctcagcgactcgggatgaaaaccatcgccgggccagtcgttttacccttagtgatggatacgctttctggcatcggcgtcgatctgatttatggtgaggtgattgccgatgcccaaccgctggatttgctggtgaatagtagttatttcgcgattaactgaggcgtgcttccccatcgcctgatgcgacgctaacgcgtcttatcatgcctacaaatcgctcattccccaggccggataaggcgctcgcaccgcatccggcgaccaacgtcatgcttcgtctggttgccagccttccgtataccagatatgcaacagcgcataagaacgccagggcttccagcgctcggcataacggcggatttgcgccggtgtcattcccggaaatcgctgtttaatcagataatcatccggcaggaaaacatctttcgcctgccagccacgcaaagcaaaataattcgccgtccagcgcccgatacccggaaaagtttgcagcgttttcatcgcctgctccacatcgcccggtattgtcattggtaaggtgccctccagcgccgcatttgccagatgaatcagcgcctctgcccgtttcaacggcatacctaacgcttttaatgcctgcgggtctgctgctgccagccgctgaggcgtcgggaagcagatatactccggaaaatcatccagccgttcgccataaagctgtgccactctggcggtcaattttgccgccatcgccacgctcaccagttggcctaaaatcgcccgcacgccctgctcaaaagcatcaacacagccgggtaaacgcaatccgggccgcgccgcgcctaacctgcccaacgcaccgttaacaatttgtgggttacattgcagatcaaacaggcggctcattttcgccagacactctgcggcaacaggttctaaacctgcacttaaatttatgtgcagagtatggcgggctatatccggaatagcagtcaccacgccgcgatattcgcccaccgccagactacgggcataataactgtccgcgaccgtttccacactgctcaccgcacgggcggcgagaaatcccaacatccagctccagtcatacggcggctgccagttcagggtatacatcgcatctccttattcatccgctttcagcataaacgttattcagacgctgcgctttgctttcatattccggttgtcgcgacggcaacatttcgctaaagtcacgccccttcttcaccggcatggggattatttcgtgtttattggttttgattacggtacagcaaactgtagtgtggcggtcatgcgtgacggtaaaccgcatttgctaaaaatggaaaacgacagcacgctgctgcctagtatgctttgcgcgccaacgcgtgaagcggtaagcgaatggctgtaccgccatcatgatgttccggcagacgacgatgaaacgcaggcgctgttacgtcgggcgattcgttataaccgcgaagaagatatcgatgttacggcgaaaagcgtgcagttcggtctttccagtctggcacagtacattgatgatccagaagaagtgtggtttgtgaaaagtccaaaaagcttcctcggtgccagcggcttaaaaccgcagcaggtagcgctgtttgaggatctggtctgcgcaatgatgttgcacattcgccagcaggcgcaggcacagctgccagaagcgattactcaggcggtgattggtcgtccgatcaacttccaggggctgggcggtgatgaagcaaacacccaggcgcaagggattctggaacgcgcggcgaagcgtgccggattcagggacgtggtattccagtacgagccggtcgcggctgggctggattacgaagccaccttgcaggaagaaaaacgggtgctggtggtggatatcggcggtggtacgactgactgtagtttgctgctgatggggccgcagtggcgtagccgtctcgatcgtgaagccagcctgctgggtcacagtggttgccgtattggcggtaacgatctggatatcgcgctggcgtttaaaaacctgatgccactgctgggtatgggtggcgaaaccgaaaaaggcatcgccctgccgatcctgccgtggtggaatgcggttgccatcaacgacgtacctgcgcagagtgatttctacagtagtgccaacggtcgtctgcttaacgatctggtacgcgatgcccgcgaaccggaaaaagtggccctgttacagaaagtctggcgtcagcgtttaagctatcgcctggtgcgtagcgcagaagagtgcaaaattgctcttagtagcgtagcggaaacccgcgccagtctgccgtttatcagcaatgaactggctacgctgattagccagcgagggctggaaagcgccctcagccagccactgacgcggattctggaacaggtgcaactggccctggataacgcccaggaaaaaccggacgttatctacctgaccggcggtagcgcccgttctccgctgattaaaaaagcgctggcagaacagttgccgggcattccgattgcaggcggcgatgactttggctccgtcaccgccgggctggcacgctgggcggaagtggtgtttcgttaattgaaaaatggctcagcagcggcttaaatctgcctgcgcctgagccagtttttctgctgcctgacgtaacggttccatcaacggcatggtccgtgctggagcatgaaggcggaatcgctgcaactctgtcgcgccgactgtcaacgcgctttccagccgatgtcgtttggcggtcattttcgccattaccgcttgtctgtctgctggcgttatcgcttcattcggcctgaacacaaaacggcgttcacagctcgctttccagtcgataaccgcctgggtcagatggtcgccaaaccctttcacttgcttaacgccacgacgggtaacatctgcggctgtttcaataccaaaagaccgtaacgccgctttacgcgcagggccaacgccgggaatagaggcaacatcaataaaaaatccctccagaaacttctgcttctgccgttcccttgcagtgtcatgaagtgctgccagagcgcgtttctcttcttccggtaacccgagaatttcgtccttcattttttcgagcatcgtccgtttggcgataaaaccttccaggccgcctacctgctggatctggcggactaaatggtcatagtccattttcgcacgattaaatgcctcacggcgttgctgaacttctgctttgtacgctttgcttgtcagactgccaataatccagatagccgccagcacaggaaccaaaataatataacgcggttctgcctgaaggccgcaaagcagcaggcttaatgcactcagtgcgatctcaagcagaatgatgtattcgcgccgtaacaggcctaaaggaagcggcctgccagtcggttggaaatgatcgggtaatggcagttgcaatgctggcggtgctacactcgccatcaccatcgcccagactttcgccagcacaaaattcccgccggtggtaatgacctcttcgccgagatcaataaaatagataacaccttgattatccagcgcacaccacgggcagtcagtcaaatgagcggggtaaacatgcattgcactaacgatacatttctttaactgttggcgtagagagtccagtgccgctacccacgctttagccgtcggacgcccggttgccacgccactttccgtgaatgcctgctgaaacatggcttcaacatcactcggtaacatgcttagcggaatagatcgtggcggcggttttaaaccacgtcgctgattatcactcgcgtaggcataacggaaatgggtaatatccgtctccagcgcattacccgcatcagagataagcggcacaccagaataaggatgccgcccaccaaacaagacgtgaaaaattagcaacgcaaggccaaaattatcgtgattttctgtgcgttcaaaaccgacaaaacttggcaaggtttgtagctctggcggcgtaaaatggctcacgccgacttcgcataaatgcagtgtgccattggcgttaatttgaaaggagtcgctatcaatcagtaccactttgctgtcgcgacctaccataaaactgttctggtttacgtcacccacgacgtgcccgtgctcgtgaaccgtagcaaaagaactagcaatattgcgcgcaacatagagtagaaaatcccacgcacaatgagggtaactctggcgacgatgtgccgggctatagatcatatgaatcggttctttaccagaaacttttggcatcataaaaccgataacttttccgcctcgtccaccgtgaagcgttgcctgcggccaggcgacataattcaacaactgcgcgtcagctgtcgcagccataaaggcaagtttgtcctgttttaaggcgggtggcggcgtgtgataaatcttggcgacgctatcgacaaactcctcgatatcataaaccgcgccttcaccacctttgcccagttcacggccaagagtggtcaattcacctgtgcttgtaaatacttttatatttgttttcataatatttcgcgggtagttatattatatttcaatgaataataacaactaaccattaaaattatttctatatggggaaaacccactcaagaataaaaatgataatgcaattttatcaggatacaattcaatttcggcctgataatgattaacttccacaggtttttgctaactttgactacaaagggattctggagaaaaaatgaaaaagatattacttatgttgagtctgctattttttactaccgcgggctttagtgaagttagcgatacgttagtgacgggaggttatgataaacaagcgatgtctgacgcgattaaacatgcgcggaaagaaaccgataaattcatcgaggttatgaataaaaaagatgccgatactttcgcagtcaaagccccgataaccgatcacggaagaaccgagcatttctggcttacggatgtcacttattctaacggcatgtttattggcgtaatcagcaatgaccctggtattgttacaaacgtagaatatggccaggagtggaaaatcaagaaagaagatattagtgactggatgtatacgcgcggggataaaatttacggcggttataccattgatcctttattggtcacctatccaaaagaagaagccgacgagctaagagcaaaattagttcgctaatcagccgttatatttattgtttaaactggcggttgaattgttgtcttcaaccgccatgagaaactcactctgcccacagcgccagtgccaacgttttatcatcatccgtacgctcgtttaccgccgggctggacaaaaactgctttaacaattcaggtaataaatcgagttgttcctgcgttgctgccgccagtccattgaaaaacggggtaaagaaaggcacatgaggagaattatccagcatatttaacgccagtcgctggataccatccgtaaatgctgcaactttgtgcgcacgcccagtgctggtgagagtttccagtctggaaacggcatcttcgtcggtaatgaagtgcgtcatgttggcatattcacccgccatcggcgtgagaggcaattgcagaccgtgacccaaatctaccaccacgccgccatcgccaatctgcataatcaaggtgccgtcagggctactaatcagtcccagaaatgtgcaggcaaaatcgcgaaccgctaattctttggcttccgcctcggcaaaaagtcgttgacgaatggtcagtaccatatttgtggcgaggacatcattaagccccaattccccgccctgcactttttggctcatataagccatcgcttcattgacggcgagcatcgcgccttcgccaccctggctgacactgcctgcgccatcagcgacaaatacgctcaataatggctgctggtcatttaaccaggcaatctgcatctggcaggcatcctgacaaggcaagtccgcgctgatgtggctcgttccaacggtacttgcatagaccagacgccagctcacacactcgtccagccttttggcgcttccagcacaacttccgttcccggcgtggagcgggaaacgctacgcaggctactggataaccagctaaacagttcacggaattgtaatccttgcagaggcaaaggctgacgaacgctaatttgtgccagcgtcttcatatccgccccctgaacaccgatggaaaagaaagcaaaccttttatcttcttccccccgaaacactttgttggctgcagcctgccactcatcggttggtgcaccatcggtaatcaggaaaatccacgggcgataatagctaataccatttgcacgatactcacgtttccgctcctctaccatatccagggctttggtaatggccgcacccattggtgtatcgccctgggcaaacaggatgggcggaaaaaaattagcggcgctggtaaagggttgttccacatgcaccgggccgaacgtcacaatgccgagttccactctttttaaagccagcggatcagcaagcagttcatcacgaaaggtaaccaatccggcgttaagttcattaataggtctaccgttcatagaaccagaaacatccagcagcaaaatgcaggggcaacgtggttccgggttactggcaaaatcgctggtggcaaacgtgatttgttcgctcataagaaatcctttcttagagaattatcgaggtccggtatcataccgactgcaataatgaaataagagcaaacgaagaaactttcagaattaggcccggcggcgcagaaaattttgctattcgcctcgcaagaacggagagccgtcgattgacactaagggcggagtgacataatttcaggagtgagggttagggagaggtttccccctccccctggtgttcttagtaagcctggaagctaatcactaagagtatcaccagtatgatgacgtgcttcatcataaccctttccttattaaaagccctcttctccgggagaggctttcccgtttcagcgtcccgctgaaatcatcggcttacctcctttcgccctgaatgcagtctatcgctaacgcgtgaataaaatagtttcctctgtgattattgcgtaacgactcgcaaagaatatttgctggcaggatcgcagactacaaagcctgcggattgacaatcttatcgtgaagacatactttcaggagtgagggtagagcggggtttcccccgccctggtagtcttagtaagcggggaagcttatgactaagagcaccacgatgatgagtagcttcatcatgaccctttccttatttatggccccttcctcgggaggggctttcccgtttcagcgtcccgctgaaatcgtcggcttacctcctttcgccatgcaagcagtctatcgctaacgcgtagataaaatagtttcctgtgttattactggatgcgtgctcgcaaatgtgcccgtcattcagacgattccagacagtgtttcataattcctccatttttctcccttattggctggctacactagtatcattccgcgaaacgtttcaggaagagaaactcttaacgatgaaaggtagttataaatcccgttgggtaatcgtaatcgtggtggttatcgccgccatcgccgcattctggttctggcaaggccgcaatgactcccggagtgcagccccaggggcgacgaaacaagcgcagcaaagcccagcgggtggtcgacgtggtatgcgttccggcccattagccccggttcaggcggcgaccgccgtagaacaggcagttccgcgttacctcaccgggcttggcaccattaccgccgctaataccgttacggtgcgcagccgcgtggacggccaactgatagcgttacatttccaggaaggccagcaggtcaaagcaggcgatttactggcagaaattgaccccagccagttcaaagttgcattagcacaagcccagggccaactggcaaaagataaagccacgcttgccaacgcccgccgtgacctggcgcgttatcaacaactggcaaaaaccaatctcgtttcccgccaggagctggatgcccaacaggcgctggtcagtgaaaccgaaggcaccattaaggctgatgaagcaagcgttgccagcgcgcagctgcaactcgactggagccggattaccgcaccagtcgatggtcgcgttggtctcaagcaggttgatgttggtaaccaaatctccagtggtgataccaccgggatcgtggtgatcacccagacgcatcctatcgatttagtctttaccctgccggaaagcgatatcgctaccgtagtgcaggcgcagaaagccggaaaaccgctggtggtagaagcctgggatcgcaccaacagcaagaaattaagtgaaggcacgctgttaagtctagataaccaaatcgatgccactaccggtacgattaaagtgaaagcacgctttaataatcaggatgatgcgctgtttcccaatcagtttgttaacgcgcgcatgttagtcgacaccgaacaaaacgccgtagtgatcccaacagccgccctgcaaatgggcaatgaaggccattttgtctgggtgctgaatagcgaaaacaaggtcagcaaacatctggtgacgccgggcattcaggacagtcagaaagtggtgatccgtgcaggtatttctgcgggcgatcgcgtggtgacagacggcattgatcgcctgaccgaaggggcgaaagtggaagtggtggaagcccagagcgccactactccggaagagaaagccaccagccgcgaatacgcgaaaaaaggagcacgctcctgatgcaggtgttacccccgagcagcacaggcggcccgagccgcctgtttattatgcgtcctgtggccaccacgctgctgatggtggcgatcttactcgccgggattatcggttatcgcgccctgcccgttagcgcgctgccggaagtggactatccgaccattcaggtggtcacgctctacccaggtgccagcccggatgtcatgacctctgccgttaccgcgccgctagaacgccagttcgggcagatgtctggcctgaaacagatgagcagccaaagttccggcggtgcgagtgttatcactttgcagttccagctaacattaccgctcgatgtcgccgagcaggaagtgcaggccgcgattaacgctgcgaccaacttgttgccgagcgatctgcctaacccgccggtttacagcaaagtgaacccggcagatccgccgatcatgacgctcgccgtcaccagtaccgccatgccgatgacgcaagtggaagatatggtggaaacccgcgtcgcgcagaaaatcagccagatttccggcgtcggcctggtgacgctttccggcggtcagcgtccggctgttcgcgtcaaacttaacgctcaggcgattgccgccctcggcctgaccagcgaaaccgtgcgcaccgccattaccggcgctaacgttaacagcgcaaaaggtagcctcgacggcccttcccgtgcggtcacgctttccgcgaacgaccagatgcaatccgccgaagagtatcgccagctaatcatcgcctaccagaacggcgcgccaattcgtctgggcgatgtcgcaactgtagagcaaggtgcagaaaacagctggctcggcgcgtgggcgaacaaagaacaggccattgtgatgaatgttcagcgccagcccggtgctaacattatctccaccgccgacagcattcggcagatgctgccacagctcactgagagtctgccgaaaagcgtgaaggtgacagtgctttccgatcgcaccaccaatatccgcgcatccgtcgatgatactcagtttgaattgatgatggctatcgcgctggtagtcatgattatctacctgtttttgcgcaatattccggcgaccatcattcccggtgttgctgtaccgctgagcttaatcggcactttcgcggttatggtgtttctcgattttagtatcaataacctgacactgatggcgttaactatcgccaccggattcgtggtcgatgacgccatcgtggtgatcgaaaacatttcccgctatatcgaaaaaggcgaaaaaccgttggcggcggcgctcaagggcgcaggtgaaatcggctttaccattatcagcctgaccttcagtctgattgcggtgttgatcccactgctgtttatgggcgatatcgtcgggcgactgttccgcgaatttgctattaccctggcggtagcgattttgatcagtgcggtggtgagcctgaccctgacaccgatgatgtgcgcgcggatgctcagccaggagagcttgcgtaaacagaaccgcttctcccgtgccagcgaaaaaatgttcgacaggataatcgccgcctatggtcgtggactggcgaaagtgctgaatcatccgtggctgaccttaagcgtggcactcagcacgctgctgcttagcgtgctgctgtgggtgttcattccgaaaggtttcttcccggtacaggacaatggcattattcagggcactttgcaggcaccgcaatccagctcctttgccaatatggcccagcgacaacgccaggtcgcggacgtgattttgcaggatccggcagtgcaaagcctgaccagttttgttggcgttgatggcactaacccgagcctgaacagtgcacgtttacaaatcaacctcaaaccgttggatgaacgtgatgatcgggtgcaaaaagtcatcgcccgtctgcaaacggcggtagataaagtgccgggcgtcgatctcttcctgcaaccaacgcaggatctgactattgatactcaggtcagccgcacccagtaccagtttaccttgcaggccacgagtctggatgcgctcagtacctgggtgccacagttgatggaaaaactccagcaactgccacagctttctgatgtctccagcgactggcaggacaaagggctggtggcgtatgtcaatgttgatcgcgacagcgccagccgtctggggatcagcatggcggatgtcgataacgccctgtacaacgcgtttggtcagcggctgatttccactatttatactcaggccaaccagtatcgcgtggtgctggagcacaacaccgaaaataccccaggcctcgcggcgctggataccattcgcctgaccagcagcgacggcggcgtggtgccgctaagcagtattgccaaaattgagcagcgttttgcgccgctctccatcaaccatctggatcagttcccggtaacgaccatctcctttaacgtgccggataactatagcctgggcgatgcggtgcaggcgattatggacaccgaaaagacgctgaatctgccggtggatatcaccacgcagttccagggcagcaccctcgccttccagagcgcgctgggcagcactgtctggctgattgtcgcggcggtggtggcgatgtatatcgtgctcggcattctgtacgagagctttattcacccgatcaccattctcagcacgctacccaccgcaggggttggcgcactgctggcgttgctgattgctggtagcgaactggatgtgattgcgattatcggcattattttgctgatcggtatcgtgaagaagaacgccatcatgatgatcgacttcgcgctggctgctgagcgcgagcaaggcatgagcccgcgcgaggcaatctaccaggcttgtctgttgcgttttcgtccgatcctgatgaccactctggcggctctgcttggcgcgctgccgctgatgttgagtaccggggtcggcgcggaactgcgtcgtccgttaggtatcggcatggtcggcggtctgattgtcagccaggtgctgacgctgtttaccacgccggtgatttatttgctgttcgaccgcctggcattgtggaccaaaagccgctttgcccgtcatgaagaggaggcgtaagtgaagttttttgccctcttcatttaccgcccggtggcgacgattttactgagcgttgccattaccctgtgcggcatactgggcttccgtatgctgccggtcgccccgctgccgcaggtcgattttccggtgattatcgtcagcgccagcctgcccggtgcgagtccagaaacaatggcgtcttccgttgccacgccgctggagcgcagtcttgggcgcattgccggagtcagtgaaatgacctccagcagtagcctcggcagcacgcgtattattttgcagtttgattttgaccgggatatcaacggcgcagcgcgtgatgtgcaggcggcgatcaacgctgcacaaagtttgctgcccagtgggatgcccagccgcccgacctatcgcaaagcgaacccgagcgatgcgccaattatgatcctcacgctgacgtccgatacttatagccagggtgaactgtacgatttcgccagcacgcagctggctccgacgattagccaaatcgacggtgttggtgatgtcgatgtcggaggcagcagtctgcccgccgtacgcgtcgggctgaatccgcaggcgctgtttaatcagggcgtgagcctggacgacgtacgcaccgccgtcagcaatgccaacgtgcgtaaaccgcagggcgcgctggaagatggcactcaccgctggcagatccagaccaatgatgagctaaaaaccgccgctgaatatcagccgttgattattcactacaacaacggcggcgcggttcgtctgggcgatgtggcgacggtgaccgacagtgtgcaggatgtgcgcaacgccgggatgaccaacgccaaaccggctattttactgatgatccgcaaactgccggaagccaatattatccagacggttgacagcatccgggcaaaattaccggagttgcaggaaaccattccggcggcgattgatctgcaaattgcccaggatcgctcccccaccattcgcgccagcctggaagaagtcgagcaaacgctgattatcagcgtggcgctggtgattctggtggtgtttttattcctgcgcagcggtcgcgccactattattcccgccgttagcgtgccggttagcctgattggtacgtttgcggcgatgtacctgtgcggattcagtctcaataaccttagcttaatggcgctcaccatcgctactggtttcgtggtggatgacgccatcgtggtgctggaaaacattgcacgtcatctggaagcgggaatgaaaccgttgcaagccgcactgcaaggtactcgcgaagtcggttttacggtgctgagcatgagtctgagtctggtggcggtgttcctgccgctgctgttgatgggcggattgccgggccgactgttacgcgaatttgccgtgacgctttctgtcgccattggtataagcttgctggtttctctgacattaacgccaatgatgtgtggctggatgctgaaagccagcaagccgcgcgagcaaaagcgactgcgtggttttggtcgcatgttggtagccctgcaacaaggctacggcaagagtctaaaatgggtgctcaatcatacccgtctggtgggcgtggtgctgcttggcaccattgcgctgaatatctggctgtatatcagcatcccgaaaaccttcttcccggagcaggacactggcgtgttgatgggcgggattcaggcggatcagagtattagctttcaggcgatgcgcggtaagttgcaggatttcatgaaaattatccgtgacgatccggcagtggataatgtcaccggctttacaggcggtagccgagtgaacagcgggatgatgtttatcaccctcaagccacgcgacgaacgcagcgaaacggcgcagcaaattatcgaccgtctgcgcgtaaaactggcgaaagaaccgggggcgaatctgttcctgatggcggtacaggatattcgcgttggtgggcgtcagagcaacgccagctaccagtacacgttgttatccgacgacctggcggcactgcgagaatgggagccgaaaatccgcaaaaaactggcgacgttgccggaactggcggacgtgaactccgatcagcaggataacggcgcggagatgaatctggtttacgaccgcgacaccatggcacggctgggaatcgacgtacaagccgccaacagtctgttaaataacgccttcggtcagcggcaaatcagcaccatttaccagccgatgaaccagtataaagtggtgatggaagtggatccgcgctatacccaggacatcagtgcgctggaaaaaatgttcgttatcaataacgaaggcaaagcgatcccgctgagctatttcgctaaatggcaaccggcgaatgccccactaagcgtgaatcatcagggattaagcgcggccagcaccattagctttaacctgccgaccggaaaaagcctcagcgacgccagtgcggcgatcgatcgcgcaatgacccagcttggtgtgcctagcacggtgcgcggcagttttgccggcacggcgcaggtgttccaggagacgatgaacagccaggtgatcctgattatcgccgccatcgccacggtgtatatcgtgctgggtatcctttacgagagttacgtacatccgctgacgattctctccaccctgcccagcgcgggcgttggagcgctgttggcgctggagctgttcaatgccccgttcagcctaatcgccctgatagggatcatgctattaatcggcatcgtgaagaaaaacgccattatgatggtcgattttgcgcttgaagcccaacggcacggtaacctgacgccgcaggaagctattttccaggcctgtctgctgcgttttcgcccgattatgatgactaccctggcggcgctgtttggtgcgctgccgctggtattgagcggcggcgacggcagcgagctgcggcaacccctggggatcaccattgtcggcggactggtaatgagccagctccttacgctgtataccacgccggtggtgtatctctttttcgaccgtctgcggctgcgttttagccgtaaacctaaacaaacggtaaccgagtaaatgacagatcttcccgacagcacccgttggcaattgtggattgtggctttcggcttctttatgcagagcctggacaccaccatcgtaaacaccgcccttcccagtatggcgcaaagcctcggggaaagtccgttgcatatgcacatggtcattgtctcttatgtgctgaccgtggcggtgatgctgcccgccagcggctggctggcggacaaagtcggcgtgcgcaatattttctttaccgccatcgtgctgtttactctcggtagtctgttttgcgcgctttccggcacgctgaacgaactgttgctggcacgcgcgttacagggcgttggcggcgcgatgatggtgccggtcggcagattgacggtgatgaaaatcgtaccgcgcgagcaatatatggcggcgatgacctttgtcacgttacccggtcaggtcggtccgctgctcggtccggcgctcggcggtctgctggtggagtacgcaagctggcactggatctttttgatcaacattccggtggggattatcggtgcgatcgccacattgctgttaatgccgaactacaccatgcagacgcggcgctttgatctctccggatttttattgctggcggttggcatggcggtattaaccctggcgctggacggcagtaaaggtacaggtttaagcccgctgacgattgcaggcctggtcgcagttggcgtggtggcactggtgctttatctgctgcacgccagaaataacaaccgtgccctgttcagtctgaaactgttccgtactcgtacctttagcctgggcctggcggggagctttgccggacgtattggcagtggcatgttgccctttatgacaccggttttcctgcaaattggcctcggtttcagcccgtttcatgccggactgatgatgatcccgatggtgcttggcagcatgggaatgaagcgaattgtggtacaggtggtgaatcgctttggttatcgtcgggtactggtagcgaccacgctgggtctgagcctggtcaccctgttgtttatgactaccgccctgctgggctggtactacgttttgccgttcgtcctgtttttacaagggatggtcaacagcacgcgtttctcctccatgaacaccctgacgctgaaagatctcccggacaatctggcgagcagcggcaacagcctgctgagcatgattatgcaattgagcatgagtatcggcgtcactatcgccgggctgttgctgggactttttggtagtcagcatgtcagcgtcgacagcggcaccacacaaaccgtctttatgtacacctggcttagcatggcgttgatcatcgcccttccggcgttcatctttgccagagtgccgaacgatacgcatcaaaatgtagctattagccggcgaaaaaggagcgcgcaatgaagttctggcgacccggtattaccggcaaactgtttctggcgattttcgccacctgcattgtcttgctgatcagtatgcactgggcggtgcgtatcagttttgagcgtggctttattgattacatcaagcatggtaatgaacagcgattacaactgttaagtgatgcgcttggcgagcagtatgcgcagcatggcaactggcgcttcctgcgcaacaatgatcgctttgtctttcagatcctgcgtagttttgaacacgataatagcgaagataaacccggcccgggtatgccaccgcacggctggcgtacccagttctgggtggttgatcaaaacaacaaagtgctggttggtccgcgagcgccgattccacctgacggtacacggcgacccattctggtcaacggtgcggaagttggcgcggtgatcgcctcccccgttgagcggttaacgcgcaatactgatatcaatttcgataaacaacagcggcaaaccagctggttgattgtcgccctggcaacgttactcgcggcacttgccacttttctgctggcgcgcggtttactggcaccggtaaaacgacttgtcgatggcacgcacaaactggcggcgggcgatttcactacccgcgtaacgcccaccagtgaagatgaactgggcaaactggcgcaagacttcaaccagcttgccagcacactggagaaaaaccagcaaatgcggcgcgattttatggccgatatttctcacgaactgcgtacgccattagcggtgctgcgcggtgaactggaagccattcaggatggcgtgcgtaaattcacgccggagacggtggcgtctttacaggcggaggtcggtacactgaccaaactggttgacgatctccatcagttgagcatgtctgatgaaggcgctctcgcctatcaaaaagcaccggtagatttgatcccactgctggaagtggcgggcggcgcatttcgcgaacgattcgccagtcgtggcctgaaactgcaattttccctgccagacagtattaccgtatttggcgatcgcgaccgtttaatgcagttattcaataacttactggaaaacagcctgcgctacactgacagcggcggcagcctgcaaatctctgccgggcagcgcgacaaaacggtgcgcctgacctttgccgacagtgcgccaggtgtcagtgacgatcagctacaaaaattgtttgaacgtttttatcgcaccgaaggttcccgcaaccgtgccagcggcggttccgggctggggctggcgatttgcctgaacattgttgaagcacataatggtcgcattattgctgcccatagcccttttggcggggtaagcattacagtagagttaccgctggaacgggatttacagagagaagtatgaccgagttaccaatcgacgaaaacacaccgcgtattttgatcgtggaagatgaaccgaagctggggcagttgctcattgattatctgcgtgctgcgagctatgcgccgacgcttatcagccacggcgatcaggtactgccgtatgtgcgccagacaccaccggatctgatcctgttagatctgatgctccctggcaccgatggcctgacgctgtgccgggaaattcgtcgtttttctgacattccgatcgtgatggtgacggcaaaaatcgaagagatcgatcgcctgctggggctggagattggcgcagatgattatatctgtaagccgtacagcccacgggaagtggtagcgcgcgtcaaaaccattttgcgccgttgcaaaccgcagcgcgagttgcagcaacaggatgctgaaagcccgttgattatcgacgaaggtcgttttcaggctagttggcgcggtaaaatgcttgacctgacgcctgcggaatttcgtctgctgaaaacgctctctcacgaaccaggaaaagtgttctcccgcgagcaattgctcaatcatctttatgacgactaccgcgtagtaaccgaccgcaccatcgacagccacattaaaaacctgcgccgcaagctggaatctctcgacgccgaacagagttttatccgcgccgtttatggcgtcggttaccgctgggaagccgacgcctgccgcatcgtttaattttagcgacattattttgttagccggagatggcgttcagaccagatccggcaacattatcccacgcatggtcagcaaactgacattatctctccgccctggcaggcatcagaaaatcgctcatactttaatcggtaaacagcacctttagaatcctgtcgtttgttttcgatttcaaaatataatgaaattatttgtttttaaatatcgagataacgatcacaaaaacgacaatatgaaaattattcgaggagtgaaaggcaaaaaaacggcctcccgatagggaagccgtagcaaagtgcgcgtgtttttatgccggatgcggtgtaaacatacgtggcagtgctatgtaggcatgataagacgcttcagcgtcgcatcaggcataggttgccggatgcagcgtaaacgccttatccgtcctacggggtggtgttgttcgtataaggcgtatcaggcgatagtaattttgctatcgagataaacgtcctgcacggcgttaatcagtttcacgccgtcagccatgcttttcttgaacgctttacgtccaagaatcagccccattccgcctgcgcgtttgttgataaccgcagtacgcactgcatcgctgaggtcagtttcaccgcccgcagcaccgccggagtttatcaacccagcccgacccatatagcagttagctaactgataacgcaccagatcaatcgggttttcgctggtcaatttgctgtaaacacgatcgtcggtgtaaccgtaattaattgctttatagccgccgttattttccgccattttttgtttgacgatatctgcaccgatggttgccgccagatggtttgcctgaccggtcaggtcggcggaaacatggtaatcaacgccatctttcttaaaggcggagttacgcaaataggcccacagcactgtcaccatacccagctcgtgcgcacgttcaaaagccgcagaaatttcttcaatctggcgacgactctcttcgctgccaaaatagatagtcgcaccaaccgcaaccgcgcccatgttgaacgcctgctccacgctggcatacagcgtttgatcgtaggtattcgggtaacttagcgtctcgttgtgattaagtttgacgaggaatggaatgcgatgcgcataacgccggcttacgctcgccagcacgccgtaagtactcgccacacagttacagcccgcttcgatcgccagttcaacaatgtttttcgggtcaaagtagagcgggttagcagcaaaactagctccggcagagtgctcaacgccctggtcaaccggcagaatagaaagatatcctgtgccagccagacgcccggtgttgtacaacgtctgcatattacgtaacaccgctggcgggcgattattgtcaatcattacgcggtctacgtagtcatgtccggggagataaagctggtcagaaggaattgtcatacaacggtgctgtaaaaggttgtcggcgtctttgccaagcaactgcgcaatatctgtcattactatgctcccgtaaattccgattggatatcggctatggattgtcctggcccgccttttgcgggcaatcataatcctggtcgttacgggcgagtttttccatcttttggatgttttttcagcgttttctgttggctcgattcatcagaaaaaatgttagcgcggtcaagttttcaccgcaaaggtatttaaaaggtattattaagtggtattgtcatcgcgtaccttacattacctgtcatgaaggaattaaaagatgaaaacaacagcaaagctgagcttcatgatgtttgttgaatggtttatctggggcgcgtggtttgtgccattgtggttgtggttaagtaaaagcggttttagtgccggagaaattggctggagctatgcctgtaccgccattgcggcgatcctgagcccaattctggttggctccatcactgaccgctttttcagcgcgcaaaaagtgctggcggtattgatgttcgcaggcgcgctgctgatgtatttcgctgcgcaacagaccacttttgccgggttcttcccgttactgctggcctacagcctaacctatatgccgaccattgcgctgactaacagcatcgcttttgccaacgtgccggatgttgagcgtgatttcccgcgcattcgtgtgatgggcactatcggctggattgcctccggtctggcatgtggtttcttgccgcaaatactggggtatgccgatatcagtccgactaacatcccgctgctgattaccgccggaagttctgctctgctcggtgtgtttgcgtttttcctgcccgacacgccaccaaaaagcaccggcaaaatggatattaaagtcatgctcggcctggatgcgctgatcctgctgcgcgataaaaacttcctcgtctttttcttctgtagtttcctgtttgcgatgccactagcgttctattacatctttgccaacggttatctgaccgaagttggcatgaaaaacgccaccggctggatgacgctcggccagttctctgaaatcttctttatgctggcattgccgtttttcactaaacgctttggtatcaaaaaggtattattgcttggtctggtcaccgctgcgatccgctatggcttctttatttacggtagtgcggatgaatatttcacctacgcgttactgttcctcggtattttgcttcacggcgtaagttacgatttttactacgttaccgcttacatctatgtcgataaaaaagcccccgtgcatatgcgtaccgctgcgcaggggctgatcacgctctgctgccagggcttcggcagtttgctcggctatcgtcttggcggtgtgatgatggaaaagatgttcgcttatcaggaaccggtaaacggactgactttcaactggtccgggatgtggactttcggcgcggtgatgattgccattatcgccgtgctgttcatgatttttttccgcgaatccgacaacgaaattacggctatcaaggtcgatgatcgcgatattgcgttgacacaaggggaagttaaatgaaaacagaacgtattctcggtgctctttatgggcaggcgttaggggatgcgatggggatgccctccgagctttggccacgcagccgcgttaaagcacactttggctggattgaccgttttcttcctggaccaaaggagaataacgcggcctgttattttaaccgcgccgaattcaccgacgataccagcatggcgctgtgtctggcggatgcgttactggaacgtgaaggcaagatcgatccggatctgattgggcgtaatattctcgactgggcgctgcgtttcgacgcctttaacaaaaacgtactaggtccgaccagcaagattgcgcttaacgccattcgcgacggtaaacccgttgctgaactggaaaacaacggcgtgaccaacggcgcagcgatgcgcgtcagcccattaggttgtttgcttccggcgcgtgatgttgattcctttattgatgatgtagcgctggcgtccagcccgacccataaatccgatctggcggttgcaggcgcggtagtcatcgcatgggcgatttctcgtgccattgacggagaaagctggagtgcgattgttgattccctgcctagtattgcgcgacatgcacagcaaaaacgcatcactacgttcagcgccagtctggcggcgcggctggagattgcgctgaaaattgtgcgcaatgccgacggcaccgaatccgccagcgaacagctttaccaggtcgttggcgcaggtaccagcactattgagtccgttccgtgcgccattgcgctggttgaactggcacaaaccgacccgaatcgctgcgccgtcctgtgcgctaaccttggcggcgacacagacaccatcggtgctatggcgacggcaatttgcggcgcgttgcatggcgttaacgctatcgatcctgcgttaaaggcggaactggatgcggtaaatcagcttgatttcaaccgctatgccacagcgctggcgaaatatcgtcaacaacgggaggcggtatgagcggcgctcgattacacacgctgctgcctgaattaaccacgcgtcagagcgtgatggtcgtcggcgcggcggtcattgacgtgatcgccgacgcttatgccctcccctggcgtgggtgcgatatcgaactgaaacagcagagcgttaacgttggcggctgcgcactgaatattgccgtggcgttaaagcgcctcggcatcgaagcgggtaatgccttgccgctcggtcagggcgtgtgggcggagatgattcgcaaccggatggcaaaagagggcttaatcagcctgatcgataacgccgaaggtgataacggctggtgtctggcgctggttgagccggatggcgaacgcacttttatgagtttcagcggtgttgaaaatcagtggaatcgccagtggctggcgcgattaaccgttgcgcctggcagcctgctctatttttccggttatcaactggccagcccctgcggcgaattgttagtggaatggctggaagagctgcaagacgtgacgccgtttatcgattttggcccacgtattggcgatatcccggatgcattactggcgcggatcatggcctgtcgacctttagtgagcctcaatcgtcaagaggctgagattgccgccgaacgttttgctttatccgcagagataacaacacttggcaagcaatggcaggagaaatttgccgcgccgttgatcgttcgtctcgataaagaaggcgcatggtatttcagcaacgacgcttctggctgcattccggcatttccaacgcaagttgtcgacaccattggggcgggcgacagtcatgccggtggcgtacttgccgggctggcctctggtctgccactggcggatgccgtattactgggcaatgcagtggcgagctgggttgtcgggcatcggggcggtgattgtgcgccaacgcgcgaggaactactcctcgcacacaaaaacgtataattactcctcgcacacaaaaacgtatagatcgctgcgacagtggctaatgctgtactcaataggccgttgctgttggtcaagcgccacttgcttgatcaccagcaccggtattttgctatctaactgaatatgactctgaaactcggcatccggcatccgggcgctaacgcgggaacgcgtacgttgtgggtaaatgtgctggctgcggaaatagtcataaagactaatcccgatggcatcaacatcatgaattaaatgcgccggaacccagctttcctcaatgcttaccgcttcttcatcgacatagcgaatacgcttaagcaaaaagacatcacttcctgcttcgaccgccagctgctgcgcgacttcttcgggacatttcacgacacgcttgttaacccatagcgtatcgggctttttcccgcgcaataccacctgctgagaaaaacctcgcgcttctttcaagctgtattcgaagatgttgttgatctgcgtgccgtaaccgcggctacgcgtcaccacaccctcttcttccagcgcctgcatcgccttgcgcaccgtaatgcggctaacgccggttaactgacttaaatcacgttcaccgggcaaaatattgccatgctccagcaccccgctgcgcacggcattttttaccgtttcggcaaacttaatataaagcggcgtgttatccgccgctaaaatacgctcgttcagttgggcaatcagctgggtatgcgcttgttccatttgtctttttcctgccggggagtctggtgggagtatatcactgcttcttatttaaggcgtttctttaatcccatcaacgaatgcctgcaactcctccaccgtgccattaaatacattaaaatccaccggaccattgatgccatctacctgtccacggtcggaatgctgccagaagcgccaggccattccgtcattgtccggacgacgttgatagtagtgagccacccaccacggatattcattgaaatagcccgccagattggtgtgataaaaaacggctccactgtaaataatcggctttttccccgtacttttttcgaccatttttagccactgacttacccgcttgcgtaattcttttgcgcttaattttccccgttcttctacgtccagcacggcagggaaatcgccttgactgaaatccaccgtttgcagaaataatctcgcctgaacactagcggatacgctcggggagaaataatgatacgccccacgcagcaggccattttcgcggcttagttgccagttacggctaaaataggggtccaccagcttttcgccttccgtcgccttaataaaagcaaactgtaagcggataccattgtcgcgcatttttgccacccgctgccagtcgatccgctcctgccagcggctaacatctattccgtgaatggtgtaactggcaggaatgcgaatagcgaaagatttaaccgggcgataaccgtagaagtggatgtagtctgtaatctgaactgctgtgctatagaaaaaattcaccgtctgacgcggataaattgcaacgatggaaattagcccaagagcgcataatagagaggtgagtttttttcgactggtaattcttagctgcattggtttcatccctgaatgtcagtgccaaaggctgacaataaccaaagcagctatagtacggcgctcaccaccaggcgtggaagtggtgaaccggaccaataccgtgaccaacttccagcgtgtcggcctgggctaacgcgctactaagccagctttttgcctcctgtacggtgtcagcccagtttgtatggcgcgggcgtagtgcagccaacgccgcagagagtgtacaaccagtgccgtgggtgtttttggtcataatgcgcggtgcggtaaaccgttgttcaccctcgcgggtaaacagccagtccgggctttgctcatcatccagatgaccacctttcattagcactgcgccacagcccatcgccaacaggcttcgcccttgttccagcatttcctgttcggtgcgcgcgtgtggcgcgtcgagcaaggcggcagcttcgggcaagtttggcgttattaaactaacctgtggcaataatcgactgcgcagcgtagcaaccgcgctaggactaagcagcgggtcgccgctttttgccagcataacggtgtcgagtaccacgttttggatctgataacgttgcaaccgttctgccaccgcttcaacaatatcggtttccgccagcataccgattttagtggtatcgattcgcacatcgctgaacacgctatcgagctgggcggcgacaaaatcaggctcaatgcgatacacgctctgtacgccacgggtattttgcgccaccagtgcagtaataacactgcaaccataagcgccaagtgcgctgaaggttttaagatcggcctgaatccccgcaccaccactcggatcagtaccggcaatcgtcagagcgttaattcgtttcatgcctgcacctcctgcgtcaattgccagagcgcatcaaggaaatgtggaacaaaactgcctggcccctcgcttctggcgactgcgcgttctccggcttgtttcatccagtgacaggcagatgcgacattttccagcgtatcgcctggtaacgcacagcaggcagcgacaaccgcgcttaatgcacagccagttcctaccactttggtcattaacggatcaccaccgtgaataccaatgatacgatgtccatcggtaacataatccatctcgccagtgaccacgacgattgcgccagtttcccgtgccagtgtttgtgcagcgggtatcgcgttagctgcggcgtcagtggtatccactccccgtccgccattagcaatgccagctaatgccatgatttcgctagcattaccacgtatcgctgccggtttaaaagataaaagttcatgacaaaaatggcggcgataatcgagcgcacccaccgctactggatcaagcgtccagggtgtttgagagctttttgcttgctcaacggcagcacgcatcgcctgagcgcgtggctgcgtcagtgtgccaacgttaatcaacaaggcactggcgatagccgcaaactgactggcctcttcggtttcgataaccatcgctgggcttgcaccgagcgccagcaaggtattggcggtaaaggtttgcaccacatcattggtcatgcagtgcacaagaggggaatgttggtgaaaaaggtgtaacgcgtgcgcagattgcgcactacccagcaggtcgacttgcatagtttgctcctgccataacgtgaagaagcaatgacctggtggtccgtgacttccctacgctggcattatccagatcaggtgatacgggtatttctcagccttcacgcagaagggcaccccgagtcgtttggttgcgatgataaatcgcagaggaggatggtaatgtccagcgcacgcgttgtaaacgaggaaaaacggcagttttacaatcgcgttaataaattatttgatataactatccagcaccttcagaacgacatccagatcttcttcacgttttagctcatccccctggtgaacgatgtgttccgtcagatgacctttaatcacttcccgcatcagaccgtttaccgcgccacggatagcagcaatctgttgtaaaactgcagcgcattcgtgcggctcgtcgagcattttcttgagcgccacgacctggccctgaatcttactggcacgcgctttcagtttctgtttatcacggattgtatgagacatggcaacacctggttaacaagaatatgaaaaatcatagcactattaatctactggggggtagtatcaggtactgggggggagtagaatcagattgccgaattaatactaagaattattatcatgaccgaatttacaactcttcttcagcaaggaaacgcctggttcttcatccccagcgccatcttacttggtgcgcttcatggcctggaaccagggcacagtaaaacgatgatggcggcgtttatcatcgccatcaaaggcaccattaaacaagcggtgatgctcggactggcagcaactattagccataccgcagtggtctggttaattgcctttggcgggatggtgatcagcaagcgctttactgctcaaagtgcagaaccgtggctccagctgatttccgcagtgatcattattagcaccgcgttctggatgttctggcgtacctggcgcggcgaacgcaactggctggagaatatgcacgggcatgattatgagcatcatcatcacgatcacgaacatcaccacgaccatggacatcatcaccatcacgaacatggcgagtatcaggatgcccatgcacgagcccatgccaatgacattaaacgacgctttgatggtagagaggtcaccaactggcaaattttgttatttggcttaaccggtggccttatcccctgcccggcagcaattaccgtgctgttgatatgcattcagttgaaagccctgacactgggcgcaacactggtcgtcagtttcagcattggcctggcgttaacgcttgtcaccgtaggcgttggcgcagcaatcagcgttcagcaggtcgcaaaacgctggagcggatttaacactctcgctaaacgcgccccctatttttccagtctgttgattggcttagtcggtgtgtatatgggcgtacatggcttcatgggcataatgcgataactcaatcctttaggcttgcatgttatcttcagcccaggatgattcttaaatcagctatttccgctgactctctgctcgctaaggatgcttttagggcatcctttcatttacactttttacgaaatcatgggatcactaacaaaatatcgcttgtcagttatattgtatggcaggaaagatatgcgactgatattacagatccccaaagtggagagtttatgaccattaaaaataagatgttgctgggtgcgcttttgctggttaccagtgccgcctgggccgcaccagccaccgcgggtagcaccaataccagcggaatttctaagtatgagttaagtagtttcattgctgactttaagcatttcaaaccaggggacaccgtaccagaaatgtaccgtaccgatgagtacaacattaagcagtggcagttgcgtaacctgcccgcgcctgatgccgggacgcactggacctatatgggtggcgcgtacgtgttgatcagcgacaccgacggtaaaatcattaaagcctacgacggtgagattttttatcatcgctaaaaaaagccccctcatcatgagggggaaatgcagacaccttgttattttttattattagccacttgctcgtcttgcttgttattagtcgtatttcacgttgattaatgcggttgcctccagtgcgccagatttaactttgtttgtatcgtagacgtagtaactggctgttatcggaatactaaccgttgtatctgtaagtttactcttcgccgcaacttcctttaaatttgtatatcctttactgctgttagtgatatttaaaagtgtgactgggctaccattactttcaagaataaatcctacgccattatcttccgcacctttcagtattgtgttgctgttggttaacaagtcagaactacttaaatacacctgcattttccgacttgtttgattttgttgacctaataaatttttacaacgcagaataatatccccttgtttactatttattgttgctttgttacctgtggctggtaattgactaacgggaatactgtctaaagtaattaataaatcgtccggtttgcaggttgtggttatcgggttgtaactcaatgtcagattaaaggaatagacacctgcattttgtgccaatgcatttctgtagctatttacacatgcatcccaactcttgccacctaataaacacagtagaaattgtactgcggcactcccgcgtgtgctactactagcactggataatgtcgcaacaccattaatcatcacactaccgccgccccccgcagaaacattcacttttgcattactggccgcaggtgtcaccgtaacactataaccactggtgaaactggtctgattattactcaacgtgatgttgtttttattggtccattcaaaatgtaaatttaattttatggtatcgttataaagtccaacaataatatcgctcgggctcataggggtgatagtatttgtacttacgcaactgctatcattaaaattatgctcatatgtcgccatttgtgtttgagtaagtgcaaaatccccctgaacaaccaagttgtgctgaacagataactcactataacatgccgcatagctcacaggcataaccatcatcattaatataaatagcattatgcgaatttccatagaaccacctgactattactggcaaatataatttctactttcatcaatctctttaccgaaggtgattgtgcaactaagtccttgttgcttatcaattgccacattaacgcttggcggtacttcattggtgcgaataaataactgacttccctggccgacaacgccaatattatgaccatggatatcattgacttcataaccaaacgttaaactttgcccatctgctcttaacgcttttataaaccatggcttgcgctgatcggtatcaaaattaaccagtacaaccgcgccgcgataaggggcggcaattttccggttgccacgtaattctgcttcgctatcgctttggctcacatccagcatcaggtgattttcccgataaggtgtcattccgtcgtatatcaccactccattacggtttgttgtgcgatatttttgcccattgacataagcatctttaattcctggcgcattcatcacagcaaacgtttcggaaagacggttcgccagattaacgccaccgctccaggcgacaatgcccccactaacactggctccagcctgtcgataagtactgctctgactataactgccattcactgtcgcaaccggcgcgttccaggtcaaattcgccccagctgtcgtttcatttccctgatgttgatgactcaggttgacaccataattgaactgatcccgactccctactgttccacttaatcccgtattattactggcaaacccctgatcatcaaacgtcgtactgttagacatatatatttgccgacgaggcgtgctaacgtcatcaccccaatcaaagggaatgcttataaaaatattaaaacgtttctcttcatgatgattctcgtcataagcctggcttgccgcgagggtatagcttatccgtcgcaggttgttggaataactcaactgataatccttactactgccgctacgcccccagtaatctcgccataacgtacttaaactcacagacccccaaccttctggcaaactctggctcatattggcggaaaagctatttttgcggccaaaatcgttctggtaataatcggcaatgtcatagacatcgttttcatcacggcgataattatctttattgtttgcccaaacgtgatcgttaaatgtccggtaatcacggctgctataacgccaggccgccagaccaaaacgcgtgctcgtttggctcacaaacttgttgtaggcaatttgataactttgcccgtcaaacacatcgccgttgtcttgtttactatggctcttagtggcatcgacggaaatggcaccaatgcgtgtattccagccagcccccaaagtaaacgcgtaataattattcgcgaccatgctgccaccatacagcgtcaataaattattaaaaccatactgataacccgcctggacaaaatcactttgtttgctcgccccttcaatatggctacgacccgccgctaaatcatatttgctcacgccgggttgcagcatatttggcaccgctgcataaggcaccagataggtggttacgctgccgtccgcctctttcacgctgacatcaagatctgctccaccaccggccaactgcaaatctgtaatcgcgaacgggccaggaggaacctctttctgataaaccacaaaaccattctgttcaatagttaccagcgcgttactctgagcaatcccctgcacccgtggcgtaaaattttgtttgctgttaggcaacatctgcatatcacgaaacaaccgcacacctctgaagcgaacagaatcaaaaatatcgctacttgtgtacatatcacccacgcgaagcgtgccgagaagttgggcaaatccacgttccagatacagggtattgcttttccacacccctggattgttatttgttttactgaaactggcatcagaatgcagttgccaccccagtaaatttaacccgctgttaaaacgtacatatgtactcttgttattaccgctcgctttatagtcgctgtaatactgactcagataataagaggtataaaacgcattaataccccgctcccagttttccggtggaacatagccactttccagttcttccacccaggcctgcgggacactgaaatcgagacgaaaaaccccgatatcccaggtatagctcccaccctgaacaagttgctcaaatgttaaacattgcttaccgctggcgaagttatcgctattaatgcctaaccgcttgataacttctctacttaaacatgtttcttgcgggttgtctttaacaataatctcatatttcccgcgccattgcttattgacataaatatcgatgtcatactgccccggtaagggttgattatcatcaagacgaatatttgcaacctgctggtctttcattccacctatcataaaatgggtatcaaaggtttcttcagctgcataagcttcaatgccgagcaataacgctacgattgcacttgcaagtggggtcattctcaacataggcagctcctgcaattaaattttgtcactaatatagttgccatggtcatcgataatggtcagatgccagttatttgcattattacttttgacattaacactctgactttctaagggggcaatcataatagtttcataattgactttgacattattagctttgacatcgctaatcgtcacccaattagcactgtcattttttatcaccaaaccattgccactgcgatttaccagcaattttttaaatgtcgctttatttaccggagcaatacccgctggccggtaaaacaacttaattctgttttgcatcgcaaacttcagtgcattcttaccttcttgctctggactatttggtggaatatccagaacattcagataaaaaatgctttctttattagtgggcagtttattcggcataattttgatttttacttgctgcccggaatttgcccctatttttgccactggtggcgttaacatgaaaggaacctgaattttttctggtggtaaactcgtatcgccatcatcaatccacgcctgcagcaggctagaacggtttccctggttcatcaactgcaccatcacttctttattttctgccgggtaaataatgcgcgtcccgtagataacaattccggcatgtgcaggaaggaccatagaaaaaatgagtaaagataataatcctttcattttaatgcctcttaaattaaaaggccgccatgggatagcggccatgtttattacctggagaaacttacaattttatttattaatcctgcgccacacgcataaccagagaagataacacatcaccactttgcacactgttatctgtcagtttcaggtattttgctttaaacggaatagcatattgaccttccgctgttttataactctcaatgttaaaaggtgcagaaacatccaggacatcgctgttatcacctaaatagagatagtaacccacggtatcgttgctactggctatcgccttatcgttaccggttattttatcgttggtaatcaagctgagttttacaccagcaacttctttcgggcagctaatttttaacatgctgctggttacaccgactgcatcatcataggtagaatatttagctttaccttcaaagacactggttggtacagtcggcatattaatacttacactatcaccacccgcttcgaatttacacggagattctgcaatattccccttaatagttaatgttccggtatcaacgtctgcagcaaatactccagcgctcataaaaaaagaagaaaagacagcggcagcaataatactacgtttcataatatgttccttaataaaatttatttttggttgttaagagtctgtatctcttggaaacaaatttctcacatcaaaaaagttgccgcaatgtaaacacattgttttattgatttaaaacaaattaaccattgcaatataaatacaaaaaatatttaagagtattaactatttatcgcatctatcaattaatgtagatttatgtaaatggtattgttgatatcaataaaaaagccgaaatcatttatataaatgatttcggctttctaaatgcaattaaaatcaggttgccaaattaatcgtagcgatttaacacgattcgacgtttgctatcgctacctgcaacaaccacttctgtcgttacacctttgacggggctagaaaacagatgacgggtgtcaacattatacgttaactgaccacaatgctgttgaggttgaccattaaccatagccatactgcatgttgggggactgatcctgccattaatcgctaatgtggcagtctcactagagaatgcgggagaagccaatccataggcaagaaaaataattccactcagccaatacttattcattgaacgttatccctgtagtaaaggttatgcctggatagaatgagtgcataacaaactatagctgtacatccactacacagccacgaaggatgataatgaagcattgcctgtatgatcaatcgactttgtagagtttcggacgaaggtccgcagaatattcgcagtattaaataagtgttcattaatgcggcaaaaactaatacaccgcatcaatgtaacatctctgcggtgtatgaagaataaccagaatggttaataggcgttagaccgcgcggaaggaaatctcgcctggaatgacttcaccctgccagtagagctgagctgcaacgcggtcagccagctggcggtagatagcggtaaattcgctctccggacggctgataaccgttggcgtacctttatcgagatcctcacgtaaggagatgtgtaacggcatctgccccagcagctgtgtatggtatttttcagccagtttctctgcaccaccggtaccgaaaatcggttcatggtgaccacagttactgcaaatatgcacactcatgttctcgacaataccgagcaccggaacctcgactttctcgaacatcacaatgccttttttcgcatcgatcagcgcgatgtcctgcggggtggtgaccacgactgcaccggttactggaatgttttgcgccagcgtcaattgaatgtcaccggtgcctggcggcatatcaagcaccagatagtcgagatccggccacaaggtttcctgcaacatctgcattaacgccttgctcgccatcggtccacgccacaccatcgcattgtcgtcagtgaccagataaccaatactattggttgccaggccatgagacataatcggtgccatatgggtaccgtccgggctagttggacgctgattttctgcgcccaacattgttgggatacttgggccgtagatatcggcgtccagaatgccgactttcgccccttctgccgccagcgccagtgccaggtttaccgccgtggagcttttacccacgccgcctttaccggaactcaccgcgataatgttcttcacaccgttaattcccggctgattcttcacgcgtttcagagtggctatgttatggctcagtttccagtcgatagctttcgccccggtgatgcgcagcagttcggcgctacattgctcttttaactcttcgaacgcgctatgccagacaaacggcataaccagttccacatgcaacgtgtcgtccatccaggcgacatggtgcaacgctttcagcgtggtgaggttatgcttcagggttgggtgctgaaaattggccagtgtcccggcgaccattgcgcgcaaggcttctggacttttggcctgggattgttcgttcatcccgactccttttttgtatagataaaccatcagctgatagtttacctgaagaatatagagaagtacttacttaacattttcccatttggtactatctaaccccttttcactattaagaagtaatgcctactatgactcaagtcgcgaagaaaattctggtgacgtgcgcactgccgtacgctaacggcagtatccacctcggccatatgctggagcacatccaggctgatgtctgggtccgttaccagcgaatgcgcggccacgaggtcaacttcatctgcgccgacgatgcccacggtacaccgatcatgctgaaagctcagcagcttggtatcaccccggagcagatgattggcgaaatgagtcaggagcatcagactgatttcgcaggctttaacatcagctatgacaactatcacagcacgcacagcgaagagaaccgccagttgagtgaacttatctactctcgcctgaaagaaaacggttttattaaaaaccgcaccatctctcagctgtacgatccggaaaaaggcatgttcctgccggaccgttttgtgaaaggcacctgcccgaaatgtaaatccccggatcaatacggcgataactgcgaagtctgcggcgcgacctacagcccgactgaactgatcgagccgaaaagcgtggtttctggcgctacgccggtaatgcgtgattctgaacacttcttctttgatctgccctctttcagcgaaatgttgcaggcatggacccgcagcggtgcgttgcaggagcaggtggcaaataaaatgcaggagtggtttgaatctggcctgcaacagtgggatatctcccgcgacgccccttacttcggttttgaaattccgaacgcgccgggcaaatatttctacgtctggctggacgcaccgattggctacatgggttctttcaagaatctgtgcgacaagcgcggcgacagcgtaagcttcgatgaatactggaagaaagactccaccgccgagctgtaccacttcatcggtaaagatattgtttacttccacagcctgttctggcctgccatgctggaaggcagcaacttccgcaagccgtccaacctgtttgttcatggctatgtgacggtgaacggcgcaaagatgtccaagtctcgcggcacctttattaaagccagcacctggctgaatcattttgacgcagacagcctgcgttactactacactgcgaaactctctagccgcattgatgatatcgatctcaacctggaagatttcgttcagcgtgtgaatgccgatatcgttaacaaagtggttaacctggcctcccgtaatgcgggctttatcaacaagcgttttgacggcgtgctggcaagcgaactggctgacccgcagttgtacaaaaccttcactgatgccgctgaagtgattggtgaagcgtgggaaagccgtgaatttggtaaagccgtgcgcgaaatcatggcgctggctgatctggctaaccgctatgtcgatgaacaggctccgtgggtggtggcgaaacaggaaggccgcgatgccgacctgcaggcaatttgcagtatgggcatcaacctgttccgcgtgctgatgacttacctgaagccggtactgccgaaactgaccgagcgtgcagaagcattcctcaatacggaactgacctgggatggtatccagcaaccgctgctgggccacaaagtgaatccgttcaaggcgctgtataaccgcatcgatatgaggcaggttgaagcactggtggaagcctctaaagaagaagtaaaagccgctgccgcgccggtaactggcccgctggcagatgatccgattcaggaaaccatcacctttgacgacttcgctaaagttgacctgcgcgtggcgctgattgaaaacgcagagtttgttgaaggttctgacaaactgctgcgcctgacgctggatctcggcggtgaaaaacgcaatgtcttctccggtattcgttctgcttacccggatccgcaggcactgattggtcgtcacaccattatggtggctaacctggcaccacgtaaaatgcgcttcggtatctctgaaggcatggtgatggctgccggtcctggcgggaaagatattttcctgctaagcccggatgccggtgctaaaccgggtcatcaggtgaaataatcccccttcaaggcgctgcatcgacagcgccttttctttataaattcctaaagttgttttcttgcgattttgtctctctctaacccgcataaatactggtagcatctgcattcaactggataaaattacagggatgcagaatgagacactttatctatcaggacgaaaaatcacataaattcagggcagttgagcaacagggaaacgagttgcatatcagttggggaaaagttggcaccaaagggcaaagccagataaaaagtttttcagatgctgcggcagcggcaaaagcggagcttaagctgattgcggagaaggtgaagaaggggtatgtggagcaagcgaaggataattctttgcaaccttcccaaacggtaacgggctctctcaaggtagcggacttatccaccattattcaggaacaaccctctttcgtagcagaaacccgtgcgcctgacaaaaatacagatgctgttttaccgtggctggcgaaagatattgctgtcgtttttccgcccgaagttgtacacaccacgttaagtcatcgccgctttcccggagttcctgttcagcaagcagacaaattgccccaattacgtcgcttagcctgtagtgtgtcgcaacgggataataaaacagccacatttgacttcagcgcctgttctttagaatggcaaaacaccgtcgcccaggcgatcagtcagatcgacggcctgaaaacaacacagttaccatcaccagtaatggctgtactcacggcacttgaaatgaaatgcacaagatataaagtgcgtgaggatgttatggatcagatcgtccaggaaggcggtctggaatatgctactgatgtaataatacaccttcaacagattgatattgaatgggattatgcgaataatgtcattattattctgccgtctggcattgcacctagctacttggagcaatattccagatttgaatgacgcctacgtaaacatttatcactgacggaagagtctctctggcaaaaatgtgcacaaaaacttattgccgcaattccacatattccagaatggcggcaaccattaattgctttgttattacccgaaaaaccagaaattgcacatgaaattgcccagcgtctactggggcaaaaaaaattaccctcgcttgagtggttaaaaatagtggcgactgatgagcacattcttgcctcattagaaaaatatcacgaaccatatgccatttttgatgattactattgtggtgcgatatggtcagccaccgtattacaggagcaaggtgttgcagccctgccccgatttgctccctatgccgcaagtgactactgcgccgatgtgttgcgtcatatcaatcatccgttcgcattgacactgcttatacgtgtagccgggcaaactaaacgctgtcacgatcggatgacgaaagccattgctgcgttcccacatgcagcaatggcggcactgacggaacttcttgggcaaaaagaagagaacagttggcgcattatgctaatgacaatgcttatctcacaaccagcactggcagaacaggtcattccctggctctcgacacccgcagttgccgtactgaaatcatgccagcaacaactgacacagccctcaaaccatgccagcgccgatctactgccagccgtagtagtctcccctccctggctttcgaaaaagaaaaaatcgccgattccggtgctggatttagcgccattaggcattgagccaatctgttatctgacagaagaaatcagtaatcaacttttggcgaaatatatctggtattcaaaacacatcacggttagccatgaagaaagtactaccaacctgttggcaaggatgggttttcaacgacggatcgctggtacatatattaaagctcccgaagcggtagttgaggcatggctaaatgaagattattcaaccttactaagtgaatttaaggtgtttcattcacctaccgggcattattggcagttggggattttgacaacattgccgctggagaaagcagtaaaagcatggaatgcccttaccctatctccacataccgataccgaatactccatgttacattttggactcaaagggttacctgggttagtaaactcacttgcacgctatccacaagaagccttgcccatcacgaattacttcgcagcgagtgagctggctcctgccgtcgcccgtgccttcaacaaactgaaaacgctacgcgaaaacgcccgtagctggctgttgaaatacccggaacatgcccttaccggcctgctgcctgcggcgctcggcaaagccggtgaagcacaggataacgcccgcgctgccttgcgtatgcttaccgaaaacggtcatcagccattactgcaagaaatcgcccgacgttataaccagccggaagtaaccgatgcggtgaacgctctgcttgcgctcgatcccttagataatcacccgacaaaaatccccactcttccggccttttatcagccatcgctctggacgcgcccggtattaaaagcaaatgcccaatcactgccagatagcgccctcctccaccttcggtgaaatgctccgcttccctcaggaagaggctctgtatccgggattattgcaggtgaaagacgtctgttccgccgactcactggcgggatttgcctgggatctgtttaccgcctggcagaccgctggcgcgccgtcgaaagagagttgggcgttcactgcgttaggcgttctcggtaacgatgacaccgcccgcaaactgacgccattaatacgcgcctggcctggtgaatcccagcataaacgcgccaccgttgggttggatattctcgctgctatcggtagtgatatcgcccttatgcagcttaacggcatcgcccagaaactgaaattcaaagcattacaggagcgggcaaaagaaaaaattgccgacattgccgagagccgcgaactcacggtggcggagcttgaagatcgggttagcaccggatctcggtctggatgataacggttcgctgctgctggattttggcccacggcagttcaccgtcagctttgatgaaaccttaaaaccgtttgtgcgtgatgtttccggcagccgcctgaaagacctgcccaaaccgaacaaaagcgatgatgaaacgcgggcgaacgatgcggttaaccgctacaaattgctgaaaaaagatgcgcgtaccatcgccgcccagcaggtagcaaggctggaatccgccatgtgcctgcgccgccgctggtcgctggaaaacttccagctcttcctggttgagcatccgctggttcgtcacttaacccgccgtctgatttggggcgtttatagcgccgaaaaccagctactggcttgctttcgcgtagcagaagataacagctccagcaccgctgacgatgatcttttcaccctgccggaaggcgatatctctatcggcactcctcacgttctggaaatatcaccaacggatgctgccgcctttggtcagctttttgccgactacgaactgctaccaccgttccgccagctcgaccgtaacagctacgccctgacagaagccgagcgcaatgccagtgaactgacccgctgggcaggcagaaaatgcccgagtggtcgggtcatggggctggcgaataaaggctggataaagggcgaaccacaggatggaggctggatcggatggatgatcaaacctttgggtcgctggtcgttaatcatggaaatcgatgaaggctttgcggtaggcatgtcgccagccgaactcagcgctgagcagctcttaagcaagctgtggctatgggaaggcaaagcagaaagatatggctgggggagtaattcaacacaggaagcgcagttctccgtaatcgatgccatcaccgccagcgagctaattaacgatattgaagccctgtttgaataaggaaagagcatggacaaggaattaccgtggctggcggataacgcccaactggaactgaaatataaaaaaggcaaaacgccgctcagtcatcgtcgctggccgggcgaaccagtgtccgttatcactggaagtctcatccagacattgggtgatgaattgctacaaaaagctgagaagaaaaaaaacattgtctggcgttatgagaattttagtctggagtggcagtccgccatcacgcaggccatcaacttgatcggcgaacacaaacccagtatcccggcccggacaatggcggcgctagcctgtatcgcgcaaaatgacagccaacagttgctcgacgaaatcgtccaacaagaggggctggaatatgcgactgaggtggtgattgcacgccagtttattgcgcggtgttatgagagtgatcctctggtagtgacattgcagtatcaggacgaggattatggctatggttatcgcagtgaaacctataacgaattcgatctccgactgcgtaagcatctctctctggcagaggaaagctgctggcagcgttgcgccgacaaactcattgccgcactaccaggaataaacaaagttcgccgcccttttattgcgctgatcctcccggaaaaaccagaaatagccaatgagttggtaggccttgaatgcccgcgaactcattttcattctaaggagtggttaaaagttgttgctaatgaccccacagcggtgagaaaactcgaacactactggagccaggatatatttagcgatcgagaagccagctacatgagccatgaaaaccacttcggctacgcggcctgcgccgcccttttgcgcgaacaaggactggcagccattccgcgcctcgcgatgtatgcccataaagaagattgcggcagtctgctggtacaaattaaccatccgcaagtcatccgcaccttgctactggtggctgataaaaacaaacccagcctgcaacgtgtagctaaataccataaaaacttcccccatgcgacgctcgccgcactggcagaactgctggcgttaacagaaccaccagcccgccctggttatccaatcatcgaagacaaaaagctgcctgcacagcaaaaagcacgcgatgaatactggcgtacgctgttacaaacgctgatggcaagccagccacaactggcagcagaagtgatgccgtggttaagtactcaaccccagagtgtgctgaagagttatttaagcgcaccgcccaaaccggttattgatggcaccgataacagcaatctgccagaaatcctcgttagtccaccgtggcgtagtaagaaaaaaatgacagctccacgtcttgatttggcaccgctcgaattaactccgcaagtttactggcaaccaggcgaacaagagaggcttgccgccactgagcctgcccgttatttcagcacggaatctcttgcgcaacgcatggaacaaaaaagtggacgagttgtattacaggaactgggttttggggatgatgtatggctgtttctgaattatatactccccggaaaactggatgctgcacgcaatagtctctttgttcagtggcattactaccaggggcgggttgaagagatcctgaatggctggaactccccggaagcacaattagcagaacaggcgctccgcagcggtcacatagaagcgttaattaacatatgggaaaatgacaactacagtcattatcgtccggaaaagagtgtctggaacctgtatttattggcacagttgccgcgtgagatggctttgaccttctggctgcgtatcaatgagaaaaagcatctgttcgcgggtgaggactattttctcagtatcctcggattggatgcgctaccaggtctgctgttggcttttagtcatcgtccaaaagaaacatttccgttaattttaaattttggcgcaacagaactggcgctgcctgttgcccacgtctggcgacgtttcgcggcgcagcgtgatctggctcgccagtggattttacaatggccggaacatacggctagtgcacttatccctcttgtctttaccaaacccagcgataatagcgaagccgcattacttgccctgcgtttactgtacgaacagggacatggcgaattgctacaaaccgtggcaaaccgctggcagcgtacagatgtatggtctgccctggagcagttgcttaaacagggtccaatggacatttacccggcacgcattccaaaagcccctgatttctggcatccgcaaatgtggtccaggccgcgccttatcactaataatcaaactgttaccaatgacgctctggaaattatcggcgaaatgctgcgctttacccaggggggacgtttttatagcgggctggaacaactgaaaacgttctgccagccacaaacgctggcagcttttgcctgggatctcttcactgcgtggcaacaagctggtgcccccgcaaaagacaactgggcatttctggcgttaagtctctttggtgacgaaagcacggcacgggatctgacgacacagatcctcgcctggccacaagaaggcaaatctgcccgtgctgtcagcggcctgaacatccttaccctgatgaataatgatatggcgctgatacagctgcatcatataagccaacgggctaaatcccgccccttacgtgataacgcggcggaatttcttcaggtggtcgcagaaaatcgcgggctaagccaggaagagctagcggacagattagtcccaaccctgggccttgatgatccgcaggcgttgagttttgattttggtccccggcagtttaccgttcgcttcgatgaaaatctcaacccggttatctttgatcagcaaaacgttcgccagaaaagcgttccccgtttgcgcgccgatgacgatcaactgaaagcgcccgaggcactggcccgactaaaagggctaaaaaaagatgctactcaggtgagcaaaaacctgctcccgcgtcttgaaacggccctacgtaccacccgacgctggagcctggcagattttcattctctgtttgttaatcatccctttacccgtctggttacccagcgattaatatggggggtttatccggcaaatgaaccgcgttgtttactcaaagcctttcgtgtggccgcagagggggagttctgcaatgcgcaagatgagccaattgacctgcctgcggacgctctgattggcattgcccacccgttagaaatgacagcagaaatgcgcagtgaatttgcacagctttttgccgattacgaaattatgccgccttttcgccagttgagccgccgcacggtgctgctcacacctgacgagagtaccagtaacagcctgactcgctgggaaggtaaatccgctaccgttgggcaacttatgggaatgcgatacaaaggctgggagagtggctatgaggacgcatttgtctataacctgggtgagtaccggctggtccttaagtttagtcccggttttaaccactacaatgttgatagcaaagcgctaatgagcttccgttctcttcgagtgtaccgtgacaataaatccgtcacttttgccgaacttgatgtgtttgatttgagtgaggcgttaagcgcacctgacgtcattttccattaaaacacagcgggcagtgatgcaactgcccgttatcaacacgacttaccagcggggaaagcgatgatcgtgcaaaaagagctggttgctatttacgattatgaggtccctgtacctgaagatccgttttccttcagacttgagatccataaatgctctgaattatttacaggttccgtctatcgactggagcgattccggctacgtccaacatttcatcaacgtgatcgagaagatgctgacccgctaataaatgatgcgttgatttatataagagatgagtgtattgatgagcggaaattacgaggtgaaagtcctgaaactgtaatagcaatttttaatcgtgaactacagaatatattcaaccaagaaatagaataatatactctaaataattcaaattggtccgatccggcgcaacgtcccaatggcctggattataaatctcattatcttaattgcaacggggtccagccgtggttataattcgttcgttggaacacgatgttgcacaggctgtggtgttaggcctgaaaatagtaaataaaagaacctgcctcaccagcaggtttttttatttactgtgatctgctttccagatatttttcgctcaaacaactaatgcgccaaacatttattgcgcgtaaaatatcgtttatttcattaatacatttcagggatgaatatatgagtccgcagaataatcatctgcagcgtccgcctgctgctgtgttatacgccgatgaactggcaaaattaaaacaaaatgataacgcaccttgcccgcccggttggcagttaagtttgcctgcggcccgtgcttttatccttggcgacgaagcgcaaaatatcagccgtaaagtggtgattagcccctccgctgtcgaacgtatgttagtcactcttgctaccggccgcggtttgatgttggtgggggaaccgggtaccgcaaaatctcttctttctgaattactggcaaccgctattagcggcgatgccgggttaaccatccagggcggggcatctaccaccgaagatcaaatcaagtatggctggaactacgccctgcttatcaatcatggtccgagtacggaagcgctggtccctgccccgctttatcagggaatgcgcgacggcaaaatcgtccgtttcgaagagataacgcgtacaccgctggaagtgcaggactgtctgttaggtatgctttctgacagggtgatgacggggccggaactcactggtgaagccagtcagctctatgcgcgagaaggctttaatattattgccactgccaatacccgcgatcgcggcgtcaatgaaatgagtgctgcgctaaagcgtcgcttcgattttgaaacggtttttccgattatggatttcgcccaggagttggaactggtcgccagtgctagcgcgcgtttgctggcccatagcggtattccgcataaagtgcctgacgcggtactggaattactggtccgcaccttccgcgatctgcgtgccaacggcgaaaagaaaacgagtatggatacactgacagcgattatgtccaccgctgaagccgtgaacgtggcccatgctgtgggcgtccgcgcctggtttttagcgaatcgcgcgggggagcctgccgacctggtggaatgtattgccggaaccatcgtcaaagataacgaagaagatcgcgcgcgtctgcgccgttacttcgaacagcgtgtcgccacacataaagaagctcactggcaggcttattatcaagcccgccaccgcctgccgtgaggaaagatgcatgagcgagccgttaattgtcggcatccggcatcatagtccggcctgcgcccggctggtgaaaagcttaatcgaaagccagcggccacgatacgtgttgattgaaggcccggctgattttaatgaccgggtagacgaactgtttttagcccaccagcttccggtagctatttacagttattgccagtatcaggacggtgcagcccccgggcgtggtgcctggacgccatttgctgaatttagcccggagtggcaggcgctacaagccgcacgtcgcattcaggcacaaacttacttcatcgatttgccttgctgggcgcagagtgaagaagaggacgatagccctgatacgcaagatgaaagccaggccttactgctgcgtgccacccgcatggataacagcgataccctgtgggatcacttgttcgaagatgaaagccagcaaactgcattaccctctgcgctggcgcactattttgcccaactgcggggcgacgcctccggcgatgcgctcaatcgtcagcgcgaagcctttatggcccgctggattggatgggcgatgcagcaaaataatggcgacgtgttagttgtctgcggtggctggcacgctccggcactggcaaagatgtggcgcgaatgccctcagaaaattaacaagccagaattgcccagcctggcagatgccgttacaggttgttatctcacaccctacagtgaaaagcgccttgatgtgctggcaggataccttagtggaatgcctgccccggtatggcaaaactggtgctggcagtggggcttgcagaaggccggtgaacaactgctaaaaactatccttacccgtttgcgccagcacaaattgcccgcttctaccgcggatatggctgccgctcatctgcatgcgatggcgctggcacagttgcgcggtcatacactaccgttacgcactgactggctggatgccatagcaggcagcctgattaaagaagccctgaacgcgccgttgccgtggagctatcgcggcgttattcatcccgataccgatccgattctgctaacgttgatagacacattagcgggtgacggattcggtaaacttgccccttctacgccacaaccgcctctgccaaaagatgtcacctgcgaactggaacgtaccgcaatctcccttccggcggagcttaccttaaatcgctttacccccgatgggctggcgcaaagtcaggtgttacatcggctggcaatactggagatccctgggattgtacgccagcagggaagtacactgacacttgcaggcaacggtgaagaacgctggaaattaacccgcccgcttagccagcatgcggcattgattgaggccgcctgttttggtgccacactccaggaagccgcacgcaataaattagaagccgatatgctggacgcgggcggaatcggcagtatcaccacatgtcttagccaggcggcgttagcgggtctggcgtccttcagtcaacaattactggagcaactcacactattaatcgcccaggaaaatcaatttgccgaaatgggccaggcgctggaagtgctttatgccttatggcggctggatgaaattagcggtatgcaaggcgcgcagatattacaaacgacgttatgcgcgactatcgatcgcacgctgtggctgtgtgaatctaacggcagaccggatgaaaaggagtttcacgctcacctgcatagctggcaagcgctttgccatattctgcgcgatctacatagcggcgttaatttacccggcgtttctctttctgcggcggtagccttactggagcgacgcagtcaggcaattcatgccccggcgctggatcgcggcgcggctcttggcgcactaatgcgtctggaacatcccaacgccagtgccgaagcggcgctgacgatgctggcgcagttatccccggcacaatctggtgaggcgctgcacggtttgctggcgctggcccgccatcaactggcctgtcagccggcatttatcgccggtttcagcagtcatttaaatcaactgagtgaagccgattttattaacgccctgcccgatttacgcgcggcgatggcctggctaccaccacgagaacgcgggacgctggcgcatcaggtgcttgagcattatcaactggcgcaacttcccgttagcgcgctgcaaatgccgttgcattgtccaccacaggccattgcacatcatcaacaactcgaacagcaggcactggcaagcctgcaaaactggggagttttccatgtctgaactgaacgatcttctgaccacccgtgagctacaacgctggcgattaattcttggcgaagcggcagaaacgacgctttgtgggctggatgacaacgcccggcagatagaccacgcgctggagtggctgtatgggcgcgatcctgaacggctccagcgtggtgaacgttccggtggattaggtggcagtaatctcaccacccctgagtggatcaacagtattcacacgctgtttccgcagcaggtgattgagcggctggaaagcgatgccgtgctgcgctacggcattgaagatgtggtgacgaatctcgacgtgctggaacgtatgcagccttctgaaagcctgctacgcgctgttttgcacaccaaacatctgatgaaccccgaagtactggctgccgcccgccggatagtgtgccaggttgttgaagaaattatggctcgactggcaaaggaagttcgtcaggctttttctggtgtccgcgatcgccgtcgccgtagttttattccactggcgcgaaactttgatttcaaaagtactctgcgcgccaacctgcaacactggcacccgcaacacggcaagttgtatatcgaatccccccgctttaacagccgcattaaacgccaaagcgaacaatggcaactggtcttactggttgatcaaagcggaagcatggtcgatagcgtgatccactctgcggtgatggcggcctgtttgtggcagttacccggcattcgtacccatctggtggcgtttgacacaagcgtcgttgatctcacggcagacgttgccgatccggtagagttattaatgaaagtacagttgggcggcgggaccaatatcgccagtgccgtggagtatggtcggcaacttattgaacaaccagcgaaaagcgtcattatcctcgtgagcgatttttacgaagggggtagtagtagtttactgacgcatcaggtgaaaaagtgtgttcagagcggcatcaaagtgctgggactggcagcgctcgatagcaccgcaacaccttgctatgaccgcgatacggcccaggcgctggttaatgtcggcgcacaaatagccgccatgacgccgggcgagctggcaagttggcttgcggagaatcttcagagttgacataacttgcggagaatcttcagtcatgaatagtctacgtccggaattattagaactgacaccgcaggccctgacggcgttaagcaatgccggttttgttaagcgcagtcttaaggaactggaaaatggcaacgtcccggagatcagccatgagaacgacgctttaatcgccaccttcagtgacggtgtccgtacccagctggcgaacggccaggcactgaaagaggctcagtgcagttgcggggccaacggtatgtgccgtcatcgcgtgatgctggtgttaagttatcaacgactttgtgccaccactcagtctacggaaaaagaagaagagtgggatccggcaatctggctggaagaactggctacccttcccgatgctacccgcaaacgcgcacaggcgctggtcgctaaaggcatcaccattgagttgttctgtgcgccgggtgaaattccctctgcccgcttaccgatgagcgatgtgcgtttttattcccgcagcagtattcgtttcgcccgttgtgattgtattgaaggcacactttgcgaacatgtcgtactggcggtacaggccttcgtcgaggccaaagcgcagcaagcagaatttaaccatttaatctggcagatgcgcagcgaacacgtcacaagttctgacgatccgtttgccagcgaagaaggcaacgcgtgtcgtcaatatgttcagcaattaagccagacattatggcttggcggcatcagccagccgctcatccattacgaggcagcattcaaccgcgcattgcaggcggcagagacctgcaactggcgctgggtgagtgaaagcctacggcaactgcgcgccagcgttgatgccttccacgcccgcgccagccactataatgccggagaatgcttacatcagcttgcggcattaaacagtcgattaaattgcgcacaagagatggcccggcgcgacagtattggtgaagttcctcctgtgccgtggcgcacggtcgttggctctggcattgccggagaagcaaagcttgatcatctgcggctggtgtctttaggtatgcgttgctggcaggatattgagcattatggtttacgcatctggtttaccgatcccgacaccggcagtattttgcaccttagccgcagttggccgcgaagtgaacaggaaaacagtccggcagctacgcgtcggctgtttagttttcaggctggcgcactggcgggcgggcaaattgttagtcaagcagcaaaacgcagtgccgatggcgagctgctgttagctacccgcaaccgcttaagcagcgttgtgccgctgagccctgatgcctggcaaatgttgagcgcgccgttacgccagccgggcattgtggctttgcgggaatatttacgccagcgtccccccgcctgcatacggcctcttaatcaggtcgataacttatttattctgccggtcgctgagtgtattagcctcggttgggacagcagccgccagacgctggatgcgcaggtcattagcggcgaaggggaagataatgtgctgacgttaagtttaccagccagtgccagcgcaccttatgccgttgaacgcatggcggcgcttttgcaacaaacagacgaccccgtgtgtctggtttctggctttgtcagttttgttgaagggcaattgacactggaaccacgggtgatgatgacaaaaacccgtgcctgggcgctggacgcagaaactacgcctgtggcaccgctaccttctgccagcgttttgcctgtgccgtctactgctcatcagttgctgatacgctgccaggcgttacttattcaactgctccataacggctggcgctatcaggaacagagtgctattggtcaggcataattgctggcgaatgacctcaccgcggtgggtttttatcggctggcacatgtgttgggacaatttcgtaatacagaaagcgaggcacgggtagaagcaatgaataacggtgttttgctttgcgaacaattattccccatgcttcagcaacaaggatgaaatagtgctttttactaagagttctactccagttccggactgctcacgccacggtattaggcatatcctatatagcccctggtgagagtcaccagttccttgattaaataaaatggagttttacatgaaggctttcaataagctgttttccctcgttgttgcatctgttctggttttctctcttgctggctgcggtgacaaagaagaaagcaagaaattcagcgccaatctgaacggcactgaaattgccattacctatgtctacaaaggtgacaaggtgcttaagcaatcttctgaaaccaaaattcaatttgcctccattggtgcaaccaccaaagaagatgctgccaagacacttgagccgttaagcgccaaatacaaaaacatcgcgggtgttgaagaaaaattaacctataccgatacctacgcgcaggaaaacgtgactatcgatatggaaaaagtggattttaaagccctgcagggtattagtggaatcaacgtttctgctgaagatgccaaaaaaggtatcactatggcgcaaatggaactggtgatgaaagccgctggttttaaagaagtgaaataatcggttggcggtcatgctctaaacatgaccgccaattttttagccttttttcacatgctggcgcgctgccagtccacgcagaaaataacgtaaaaattgatcgccgcattcgcggaagtttttatgatccggtgcgcgcatcatcgctgtaatttccggcatgctaacgcggaactgctgttcggtgaggatagccagaatgtcatcggttttcaggctaaacgcgatgcgtaattttttcagcacgatgttgttattaatgcgacgttccggctccagtgccggagcagactcatccttgccgcgtttttcataaatcaggccattgaggaaactgctcaaaacaatgtccggacaacgctgaaaaccctcttcgtcttctttacgtagccagacggcgatctgttccgcggtggcttcgacattacccagcgccagaatacgcaccaggtcattattattggctttcaaaatgtagcgcacgctgcgcagaatatcgttacttagcatgaggccttcaggtgttgatgaggcaaaaagccattttagcagtcttttacaggccaatcgcctcttttaagcttttcagataacggcggctgaccggcacggttaagccattacgcaaaatcaactcggcctggccgttatcttccagacgaatctcctgtaaatgcgcgaggttaaccagatactgacgatggcagcgcagtagtggtgtacgactttccagggtacgtaatgtcaattcggtaaagccctctttcccttcgtggctggtaacgtagacaccgctcatccgactgctgacaaatgccacatctttcatttgcagcaaataaatccgactatgccccgtacaagggataaatttcagcgcctgttgattttccggtaacaggctaacatcctgcttgctgcgctcctgacgcaatcgcgccagcgttttctccagtcgcgcttcatcaattggcttcagcagataatcaaaggcatgttcttcaaaggctttaattgcgtattcgtcaaacgcagtgagaaaaacaatatacgggcgatgttccgggtcaagcatccccaccatttccagaccactgatgcgcggcatctggatatcgagaaacagcacatccgggcgcagtttatgcaccgcgccgatcccttccacggcgttactacactctccaacgatttcaatatcgctctgctcctgcaaaaatacacgcaggttctcccgtgctaacggttcatcatcgacaattaagactttaatcatgcctcgtccctccatggtagtcgtaacgttattcgggtgtaactatcaggctcacaggcgacgcttattccatagtcatcgccaaaccgttcacgtaaacgcttatccaccagattcatccccagcccactggcattggttaccggttgatacaaaccggcattgtcttcgatctccagcatcaaatgttgcccctcacgtcgggcgctgattgccactcgccctgtatccagcagttgacttgtcccatgtttaatggcgttttccactatcggttgcagggtaaacgcgggcaattgctgctgggataattcttgcggaatagcaatgttgacctgcaaccggctctggaagcgcgccttttcaatttgcagataagcattcacatgttcaatttcgtcggcgagagtaacaaactcgctaggccgctttaagtttttgcggaaaaaagtggaaagatactgcaccagctggctggcctgttcgctgtcgcggcggatcaccgctttaatggtgttaagcgcattaaacaaaaaatggggattcacctgggcgtgaagcagtttgatctcactctgggtgagcatcgctttttgccgctcatattgcccggcaaggatctgcgcgctaagcaattgcgcaatcccctcacccaacgtgcggttgatgctactgaataaacggtttttggcttcatacaatttgatggtgcccatcacccgctgattttcaccacgcaacggaattaccagcgtgctccccagtttgcattgcggatgcaaagagcaacggtaaggtacttcgttgccatcagcgtagaccacttcaccggtttcaatcgcttttaaagtataagtactagaaatcggtttgccgggtaaatggtggtcgtcaccaattccggtaaaggccagcaatttctctcgatcggtaatcgcgactgcaccaatatccagttcctgatacagcacctgagccactttcatgctgttcacttcgttaaacccctggcgcaaaatgccttccgtgctggctgccactttcagcgcagtggcagaaaaagcgctagtgtatttttcaaacatcgcgcgtttatcgagcaatatacgcataaacagcgccgcgccgacggtattggtgaccatcattggcgcagcaatattactcaccagacgcaccgcatcttcataaggtcgggcgatcgcaaggatgatcagcatttgcaccatttcagcgacgaacgtgacggcaccggcggtaatggggttaaagactttatcagtgcgcccgcggcggatcaggatgctgtgtaccaggccaccgagtaatccttcaacgatggtgctgatcatgcaacttaacgcggtcatgccccccatgctatatcgatgtaagccgccggtcagcccaaccagcccaccgacgaccggaccgccgagtaagccgcccattaccgcgcctatcgcacgggtattggcaatagaatcgtcaatgtgcaacccaaaccaggtgcccatgatgcagaagatggaaaagacgatgtagcagagaaatttatgcggcagacgaaccgtgacctgcattaacggtatgaataatggcgttttactcattaaccatgcaatgactaaaaaaacgcacatctgctgaagcagcagcaacaccagattaaaatcgtacatacccgcaaaccacacttccctttaaaacgcgtaacatacattgcctgcgtttaactttctttgaactcttgcagaaaaatgagaattcgtgagtacgatcactcaaaatcgcctggcaaaaataaaatcaccctatagatgcacaaaaaacgggcaaaactacctggttcgcaaaactgcgtctaaagttaaaccgggacctcgcgagcaagggtgagacgatggcgctttacacaattggtgaagtggcgttgctttgtgatattaatcctgtcacgttacgcgcgtggcagaggcgttacggattgctgaaaccgcaacggacagacggcggtcatcggctgttcaacgatgccgatattgaccggatccgcgagatcaaacgctggatcgacaacggcgtgcaggtcagcaaagttaaaatgctgctcagtaatgaaaatgttgatgtgcagaacggctggcgcgatcagcaagaaacattactgacttacctgcaaagcggcaatctacatagcctgcgaacgtggatcaaagagcgcggtcaggattaccccgcccagacactcaccacacatctgtttattcctctgcgccgacggcttcagtgccaacaaccgactctccaggcgctgctggcgatcctcgacggcgtactgatcaactacatcgccatttgtctggctagcgcacgtaaaaaacagggtaaagatgcgctggtggttggctggaatattcaggataccacccgtctgtggctggagggctggattgccagtcaacaaggatggcgcattgatgtcctcgcccacagcctcaatcaactacgccctgaactattcgaaggccgtacattgctggtgtggtgcggtgaaaatcgaacctccgcccaacagcagcaactcaccagttggcaagaacaaggccatgatattttcccactcggcatttaatgattcgttaacaaatgcgctttactgtacaatcctttcgttaacataaggagtgcattatgcgcatagctaaaattggggtcatcgccctgttcctgtttatggcgttaggcggaattggtggcgtcatgctcgcaggttatacctttattttgcgtgctggctaagcgcctgcaccagcctttcaaacaggcggtctgcgatgatcgccgccagtgccaccagtaacgccccctggatcacatacgcggtattaaatccgctaagcccgatgatgatgggcgtacccagcgtgctggcccctaccgtactggcgatcgtcgccgtaccaatgttgataatcacgctagttcgcacgcccgccagaatcaccggagccgccagcggtagctcgaccttacgcactcgctgaccacgactcattcccatacctttcgcaacttctgtcacgctggcatcaatcgctcccagcccggcaagtgtcgcctgcaggacgggcagcacaccgtaaaggatcaaggcgataatcgctggttgcagaccaaagccgatcaccggaacggcgatcgccagcactgcgacgggcggaaaagtctgtccaacggcggcaatagtttccaccagtgggcgaaattccgcgccccacgggcgagtgacagcaattccggcaccagtgccaatgatcaccgcaaacaaactgctaattcccaccagccagaaatgagccagtgccagagctgcaaaactttcttgctgataaacgggtcgtggcagttgtgggaacaaggcagcaaacagcggctggctgtaaggcagccagaaaatcagcgccacaaacagagcaatgagccagaacagcggatcgcgcaacatcttcatacgcttacgcctccaccagcagatcctgaaaatgcagcgtgccgcaaggctggccctgcatgttcaccaccggcagcacctcgcatccccgcgcaacaaacagagagagcgcatcgcgtagcgtcatctcttctgccagtgcctcaccatctgctcgttcttcgcgacgcacgtaatccgccacactacgtaagctaagcaggcgcacacccagttcactacgtccaaaaaactggcggacaaaatcattcgccggacgagtcagcatcgtcagcggattgccctgctgcactacttcaccgtgatccatcaataccagatgttctgccagccgtagcgcctcatcaatatcatgagtgaccagcacaatggtacgccccagcaaacggtgaatgcgcgtcatctcttgttgcaacgcgccgcgcgttaccgggtccagtgcgccaaaaggttcatccattagtaagacttgcggatcggcagccagtgcacgcgccactcccacacgttgctgctgaccaccggaaagctgatgcggataacgctcacgcaaattactctccagccccagtagcgccattaattcgtcgatacgatcgtcaatccgcgcccggctccatttttgtaattgcggcacggtagcgatgttttgcgccacgctccagtgggggaacaggccaatagattgaatggcatagcccatccggcggcgcaactccagtactggcaggctgcgaatttcttctccggcaaagcggatctctccgctgtcatgctccaccaggcggttaatcattttcagggtggtggatttgccggagccagatgtgccaatcagcacgctaaaactcccttcctgaaaattgagattgagatcgttaacggctttttgtgcgccgaacagtttgctgacatggctaaattcaatcattacgtttcaccttcagcagtgcgataagcaaatcgaacagcgcgtcggtaagcaccgccagaacaattaccgggatcacccccagcaacactaaatcaatggcgctgcttagcagcccctggaaaaccagcgcaccaaaaccgcctgcgccgattaacgccgcaatcaccgccatacctacagtttgcaccatcaccacccgcaggctgcgcagaaataccggtaacgccagcggtaactgaacatgcaggaaacgctgcgccccgctcatccccatcgctctggcgctttccagcacatcgcgcgggatctggttcaaaccgactaccacgccgcgcaccagcggcagcaaggcatagagcaccagcgcaatcagtgcgggtgtcattccggttcctgctatgccgagcgtccccagccacggaaaggccgtaaccagcgcggcaagcggcgcaatcaacaggccaaagagcgccacgctaggcacggtctgaatcacattgagcagagaaaaaattgccccctgccgagcagtggaaaagtagcaccagatgcccaacggcacaccaatcactaacgcaggcagcaccgcaccaaacagcaacgtcagatgttgtgccagcgcgtcgtcaaacacatcctgacggttggcgtattctttcattagactgagatcgttaagcgtgccggagtacagcaaccacagcggaataatggcaatctgcatatgcaacaaccagcgccacagcggatgcgtggagattcggcggatggcatcgctacaggccagcaatgccagcgccgcagccagccagaaaccactgccgaggctggtacgcgccagcgcactgccattttgcgccagttgggtcgccgcctttccagctccccacaccagcaatacgaagacgaattgcgccagaatgagtgcacaaatgctgccttttttaccgggaataaaacaggccgtcagccaggcgcaaccaacgcccaccagcatccagatcgtttgcggccacagctgccagagatgacgcccctcaccgctaactaaacgattaggcgcgtaactgataaacggcagcgccgctgcgattgccgtcagcaacagcagcagcgccagaacaggattaatacggaaataagtcacgggaaattacttcgtccaccctttttgtttcaggtagtcggcagccacttttttggcatccagtccttccacagcaatgctggcattcagttgctgcaatgtttttgcatcgaggctggcgaagactggctgtagccactgtgccatttgcggatactccctcaacacgctctcacgcaccactggtgcaggcgcgtagataggttgcacaccttgcggatcgcttaaggtttgcagccccagcgccgctaccgggccgtcagtgccgtaagccattgcagcattaacgccagaggtttgctgggcagcggctttgatcgtcaccgccgtgtcgccaccagccagactcagcaactgatcctgaccgagcttaaagccataggctttttcaaacgcgggtaacgcatcggcgcgttcgataaactctgcgctggctgccagtttgaaggtgccgccctcttgcagataacgactcaggtcggcaaggctagtgagtttatttttctctgccacatcctgacgcacggcgatagtccaggtgttatttgcaggcgcgggcgtcagccagattaacttgttgtgctcgctatcgagctttttgactttctcgtaaccttgctgcgcgtttttccacgctgcatcgttttcatctttaaagaagaaagcgccattgccggtatattccggatagatatccagttcaccggaagtaatcgccccgcgcaccacaggagtcgttccgagttgcactttattcaccgtcggtacgccgtggctttccagcacctgcaaaatgatattgccgagtagcgcaccttcggtatcgattttactaccgactttaacgggggaagccgcctgtagcggcaggctcacggctgccaacataaccagactacctgcccagagctttaagagtggcatgatgctttcctcattcttttactgttgttttcagcgaattaagagaaaagcatagttgataatggcggggttagcttgagcggaaggattcagttgcagaatcagataaatacttaagaggcatattcggtccggcgtttcctgccggatgcggcgcgagcgccttatccggcctacaaagggcgcaaacgtcgcgcccttactaaagcattacagcaactcaaactcgcctttcttaacgcgtgcggaatcagtgccgataaagacattgaacttgccaggctcggcgtcatatttcatctgttgattccagaacttcagcgcctcaatatcgatcgggaagctgacagtctgagtttcgcccggtttcagggtgattttctcaaagcctttcagctgtttcacagggcgactcatggaagccgtcacatcctgcaagtacatctgcactaccgtggcaccctcgcgcttaccggtgttcgtcacctgcacgctggcagtcactttgccgtcacgcttcatggtcggcgcagaaagtttcacatcagagacggtgaaagtggtgtagctcagcccatagccgaacggatacaacgccccgttagcttcatcaaaataacggctagtgtatttgttcggcttgtcggcattatacgggcgaccggtattcagatggctgtagtacaccgggatctgcccgacagaacgcgggaaggacattggcagcttgccggacgggttgtaatcgccaaacaatacatcggcaattgcattaccgccttcagtccccgcaaaccaggtttccagaatcgcatcagcctgctgatcttctttcaccagcgccagcggacgcccgttcatcagcaccagcaccagcggtttaccggtggctttcagcgccgcaatcaagtcacgttggctttgcggaatagtgatatcggtccggctggaggcttcgtgcgccatcccctgtgcttcaccgactacagccaccaccacatcagattgtttcgccgtctgcaccgcttcatcaatcatctcttgcgggctacgcggatcgactttgaccgcttcttcatactgattcaggaaatcgataatgcctttgtcactggtaacgttcgcccctttggcatacagcactttaccgttttcaccgacggcatttttaatcccggtcagtacggtcacggattgatcggcaacaccggctgcggaccagctgcccatcacgtcacgtttactgtccgccagtggcccaaccaccgcaatggtggcgctttttttcagcggtaacgtttcgagacggtttttcagcaacaccaagctttcgcgcgccacttcacgcgcttctttacggtgcaggcggctttcgtcattggtatccaccgggtcagactctttcggccccaaatggctgtatgggtcgttaaacaaccccatatcatatttaacgttcagtacatggcgggcagcatcgtccagctctgccatcgtcactttgccggatttaatcaacccaggcagatacttgctgtagtactcgtcgctcatgctcatgttgattccggatttcagcgccacgcgcaccgcatcttccgggtctgccgccgtgccatgtttaatcagctctttgattgcaccgtgatcggaaacggtgatgcctttaaagccccactggtcgcgcagaacatctttcagcagccaggaatcggaggtggctggcgtgccgttcaggctgttcagcgccaccatcaccgcgccgctgcctgcgtccagccccgctttgtacggcggcatataatcattaaacaggcgctgcggactcatatcgacggtgttgtactctttaccgccttctaccgcgccgtatgcggcaaagtgtttgacgctggtcatcacgctgtagcgatctgccgggcttttaccctgcatcgcttccaccatggttttacccattgtactggtgagatacgtatcttcgccaaaaccttcggaagcacgtccccagcgcggatcgcggctgacatcgaccatcggtgcccaggtcatattcaggccatcatctgccgcttcataagcagagacacgtccgaccgttttcactgcatcgaggttaaaagagctggccagaccgaggctaatcgggaacaccgtgcgctgaccgtgcagcacgtcgtaagcaaagaaaagaggaattttcaggcggcttaattccatcacctgatcctgcatggcgcggatatcctgacgggttacggtgttgaaaatcgccccaacctgaccgtctttgatcatctcgcggatcgcctctttcgggttatccgggccgacgctgattaagcgcagctgaccaattttctcatcaactgtcattttcttaagcagttcggtgacgaacgcatcccgcgcttcgggcgttaatggatggttgccgaataaatcatccgccagtgctggctgcagggccagactcaccgcgattcctacactacatagccatttcatatggatttttcttcctttgttgcccgacgtggcagcgaaaatggtgcaaaaaccgtagtttgccataagcatgatggagagagaaaaagaatgctcagtttattgtctgaattttcaaaatattcactcgctgaattgttatacaaggcgctattctagtttgtgatattttttcgccaccacaaggagtggaaaatgtcttccatgacaacaactgataataaagcctttttgaatgaacttgctcgtctggtgggttctagtcacctgctcaccgatcccgcaaaaacggcccgctatcgcaagggcttccgttctggtcagggcgacgcgctggctgtcgttttccctggcagtctactagaattgtggcgggtgctgaaagcctgcgtcaccgccgacaaaattattctgatgcaggccgccaatacaggcctgaccgaaggaagcacgccaaacggtaacgattatgatcgcgatgtcgttatcatcagcaccctgcgtctcgacaagctgcacgttcttggcaagggcgaacaggtgctggcctatccgggcaccacgctctatagcctggaaaaagccctcaaaccgctgggacgcgaaccgcacagtgtgattggaagtagctgtataggcgcaagcgtcatcggcggtatttgtaacaactccggcggcagcctggtgcaacgtggcccggcgtataccgaaatgagcttattcgcgcgtataaatgaagacggcaaactgacgctggtgaaccatctggggattgatctgggcgaaacgccggagcagatccttagcaagctggatgatgatcgcatcaaagatgacgatgtgcgtcacgatggtcgtcacgcccacgattatgactatgtccaccgcgttcgtgatattgaagccgacacgcccgcacgttataacgccgatcctgatcggttatttgaatcttctggttgcgccgggaagctggcggtctttgcagtacgtcttgataccttcgaagcggaaaaaaatcagcaggtgttttatatcggcaccaaccagccggaagtgctgaccgaaatccgccgtcatattctggctaacttcgaaaatctgccggttgccggggaatatatgcaccgggatatctacgatattgcggaaaaatacggcaaagacaccttcctgatgattgataagttaggcaccgacaagatgccgttcttctttaatctcaagggacgcaccgatgcgatgctggagaaagtgaaattcttccgtccgcattttactgaccgtgcgatgcaaaaattcggtcacctgttccccagccatttaccgccgcgcatgaaaaactggcgcgataaatacgagcatcatctgctgttaaaaatggcgggcgatggcgtgggcgaagccaaaagctggctggtggattatttcaaacaggccgaaggcgatttctttgtctgtacgccggaggaaggcagcaaagcgtttttacaccgtttcgccgctgcgggcgcagcaattcgttatcaggcggtgcattccgatgaagtcgaagacattctggcgttggatatcgctctgcggcgtaacgacaccgagtggtatgagcatttaccgccggagatcgacagccagctggtgcacaagctctattacggccattttatgtgctatgtcttccatcaggattacatagtgaaaaaaggcgtggatgtgcatgcgttaaaagaacagatgctggaactgctacagcagcgcggcgcgcagtaccctgccgagcataacgtcggtcatttgtataaagcaccggagacgttgcagaagttctatcgcgagaacgatccgaccaacagcatgaatccggggatcggtaaaaccagtaaacggaaaaactggcaggaagtggagtaaaaattacggatggcagagtatcgccatccgaattcacttaatcgttctgtgccgtctgccccgccgccgccatttgggcggctttttgttttttatagctcaacgctgctgccggcacaggcatcactttaccggtttcaatccaggtacgcaggcggctggcatcggcaaaatgggtatatttgccaaacgcgtccatcactaccagcgccaccggtttattattgataaccgtacgcatcaccagacaatggcccgccgcattggtaaagccggttttggttaactgaatattccagttatcgcgatacaccagatgattagtattgcggaacggcagcgtatacgtcggattagagaaggttgccatatcttcccgggtagtacttaactgcccgatcaacggatattgtttgctggcaatgagcagtttggttaagtcacgggcagtactaacgttatgcacgctcaatccggtaggttcaacaaagcgcgtgttgttcattccgaggcttttcgctttcgcattcattgccttaataaaggctttgtaaccaccgggataatggtgcgcaaggcttgccgccgcgcggttttcactagacatcagcgccagcaacagcatatctttacggctgatttcgctattcagtcgtacgcggctatagacccctttcatctccggcgtctggctgatatccacttttagtttttcatccagcggcagtcgtgcatccagcacaaccatcgcggtcattaatttgctgatagacgcaatcggacgcaccagatccgggtggttgctatagatcactttgttggtattcagatcaacaatcatcgcgctaccggaggcaatttccggttgactagcggtggtagcggctgccgttttcgcaacggcctgcggtgcaaaaggcacagccagcatcagggccaggctaaataaagaaactcgaaatttcggcatgatgagcattcagatagtggttcacgcgcacgggttgcgcaccgccggagtaaggatttactgaggctagcgacgccatcataacgagcaaaaagtgcgatcgtcaaaggagaatcgtgaggaaatgctgcattgctgacatttacgccagcaatgcaacgtcaaagaactttttagaacaaacgataaccgtagccccatagtataacggttagggcgagcagcacttccagtaccagcacgccaatcgccagcgtgctactagagaagctaaggccttcctctttgttgatattcaggaagctcggaataccaaggtaaagcaggtagccggtgtaaaacagcgccaccgtgccgaccagcgcacacaaccagaccagtggataaagcgccaccagaccgcttaaaaacagcggagttgcaacgtagcccgcgaagaccatgcagtgcgcaagactcggacgctgcggataattacgcgccatccaccagatgacccgccccatcaccgcgaccccagccagcataacgccgtaaaacaagacagccagcgccagtccggtaaaccaggataacttcaggatagtgccatcgccaaaattccagccaatctgtgtagtgccaatgaaggcgcaaatcaccggaatcgccgccatcagcaaaacgtggtgggtgtaatggtgagaaatcgtttcgttttcgcgattaatcacctgcatttcacgatcgggatgggaaaacagtccccagacatggctcataccgcccccttgttgtgagttcatgaacctgacagttcaagtataagtcagcttgtgattattttttgttcgcccatgtaattttcactgtctgatgaacgtcctttttcagcgtgaatgattcacagggtgtatgcttactggcaaccaaagggagacagactggcctatggatctcaatacacttatcagtcaatatggttatgccgcgctggtgatcggtagcctggcggaaggtgaaaccgtgactttgctgggaggcgttgcggcgcatcaggggctattaaagttcccgctggtggtactttctgtggcgcttggcggcatgattggcgaccaggtgctctatctgtgcgggcggcggtttggcggcaagctgttacgccgtttcagcaaacatcaggataaaattgagcgggcgcagaaacttatccaacgccatccgtatctgtttgtcattggtacgcgctttatgtatggctttcgggtgattggcccgacgctgattggtgccagccagctgccgccgaaaatctttctgccgctgaatattctcggcgcatttgcctgggcgttgatttttaccactattggttacgctggtggtcaggtgattgcgccgtggttgcacaatctcgaccagcatttgaagcactgggtctggttgattctggtcgtggttctggtggtgggcgtgcgctggtggctgaaacgacgcgggaagaaaaagccggatcatcaggcgtaaaaccattgccctggataaggcgttcgcgccgcatccgacatccggagtaccatgcctgatacgacgcttgtgcgtcttttcatgccgaccaaaatattacccaatgaaatatccacgcacctcactgcgttattctgggttgaactgtggattcgccaacataaagccgccatccactatcaagctctgcccggtggtgtaatttgcgccctcgctacaaagccacaccaccaggctggcaatctcatgcgttgcgccaaaacgccgcaagggaatgctaggctccgcgtcgggcttcacgtcgctgtcatccatgccattcattggcgtggcgatcgccccaggcgcgactgcgttcaccaaaatcttatgcctgaccagctccagcgccatcgctttggttaacccaccgagcgcatgtttagcggctgtgtaggcgctggcatccggcagcggcgtatgttcatgtacgctcgtaatgttgatgatgcgaccgccctgcccttgtttcaccatctgacgagccgcaatttggctgcataagaatgcaccatcgacatcaacggtaaaaatcttgcgccactcatcaaaagccatatcaagaaacggcgctttggtcattgcacccgcattattcaccagcacatcaatgcgccccagccgttgaatgagtttctccagcgccagtgccccttctggtagattgccgagatccagctgcacgatctccgcacgtacgccgtggctaactacctcacgcgcggtatcttttgccccttcttcatcactgtgccaggtaataccaatatcaaacccctgctgcgccagtaataacgcgcactctttgccgatcccgctatcggaggcggtaataatcgcaacctgtgccatcgagttctccacttaacgctgaataaacgttaagtatagaaggcgcatatcatcagcgtttgtaccccccgcccaacgcaccagtgagttgaatggaggcatccagccactgcccttgcaataacaggccattggcccgctcacgcagcgcggggattctggcttcgctgacgcgggaaccagcaatgatgcccgcgttaaagcgcgcctgcgcaagacctaccacacgcaaggcatcgcgctcaatttgcgcctgatgctggtttttctccgccagtgtctgaacctgactggctgcccgcgccacgtcattcaccgcttcaaccaccgctttgttgtagctggcgatagacaagttgctttcggcttttgcgatatcgagattggcgttaagacgaccactatcgaaaatgggtagcgtcaggcctgccgtaacgcccatttgctgcgcggaatgacggaacagatcgcttaagtgcaacgcatcctgttgcaggaaggccatcaggttgatgtcaggataaaatgccgcttttgccgcatcaatggtgcttaggctactctcaacgtaccagtgcgccgcctgcaaatctgcccgccgggccagtaaggagtaccccagttcatcaggaagctggcttgccactttcggcaacgcgaccggtttaagcttcaaactctttgtctggttatttgtaagtgcgcttaaccgtgcctcaataattttcattttccccgcgacatcgttgagctgctgccgggttttgctggcattaatatcggtttccacaccttcaacactagaagtaatcccgttctgatatagctggcgatcggtcgcgataatggtgttctgctctttttctatttgctgcaagaccgtgtttaacgccgcctgggtttgccactcccagtacaggcgggctacgctgccagccagcaattggcgggtttgctcgcgttccgccgcccgtgctttaaccgtacccaggcgggcagtaacctccgcccgattctttccccagatatcgagatgccagcccgccgttaagccaaaagtaccgttggtgtaccacgggccggtcgtacctgcggccggatcgttcagagcaaacggccccattaagccttctgcgctcattttttgccgctccatatccgccgaaaagtcgatctgcggaccatcctgagtggcaactgccttcgcctgggcttcagctagctgaatgcgctgttcagccacctgcatatccggtgcgttctgtagtgcattgttaattaaggaagactgttgattatcgtgatactccagccaccattggctgtctggccaaccattttcagcgccgtgggtaatgcggtgtcaacttgtgcagcgggcgtttgctggcttaacgcctggcgggtttcatgcataggcgcacacccggccagcatcagtaacagcggaaaacaggcgatggctggataaaaggaatcacgattcatgggggaataatcaggtaagaaaaggtgcgcggagattaccgtgtgttgcgatatattttttagtttcgcgtggcaatacatcagtggcaataaaacgacatatccagaaaaatatacactaagtgaatgatatcttccgatttatcttaatcgtttatggataacggcaaagggcttcgttttttcctatacttattcagcactcacaaataaaggaacgccaatgaaaattatactctgggctgtattgattattttcctgattgggctactggtggtgactggcgtatttaagatgatattttaaaattaattaatgtcatcaggtccgaaaataacgagaatatttcagtctctcatcctgttgcgctcctgtcatgtgcattgcttcatataatcactggcgcaaggagcgcgcagggggcggccaatcgccgccgccccctgcacccccgggctctggcgaacaaaatcgccgctgcgcggtgccctcggcttatcccttacggctaccgggtcgggcgcgaggtaacatccctgtaaaacgcgccctcagcccacatccatgtgggctgccccggccttcagggaacgcctcggcaattttgacgccaccaaacaaccgtgcggcctattgataaagagctaacacattgtcaaaaaacatcactatggttttttagagtttctcgatatcaattgcctgaatagcccttgcaatatcaggggaattattcaacacccgaacatgctgaaataattccgttgcttcatcgtattctttacgcaaataactcaaccactgtttaatccgcgcaacgtgatataacccggtatcgccctgcttttccagacgggtatatttttgcagcaaagcaaccacctccggccacggcattcgcggttcgttatattttaccacccggctcaggttgggaatattgagcgccccgcgaccaatcatcactgcgtcgcagccgctgatcgccatgcattgttgcgcgctctgccagtcccagatttcaccgttggcaatcaccggaatattcagccgctggcgaatatcgccaatcgcctgccagtcaatatgctccgcgcggtaaccctgctctttcgtccgcccatgcaccaccagctccgtagcgccagcctgttgaaccgcatcggcgatttcaaatttcttctcaccgctgtcccagcccagacgcactttcacgctgacgggcaaatgcgccggtacagcttcacgcatcgcttttgcaccctggtagatgagttcaggatctttgagtaacgtcgccccgccgccgctaccgttaaccgttttgctcgggcagccgcaattgagatccacgccccaggaacctaactccaccgcacgggcggcgttctctgccagccattgtgggaactgacctaacaactgcacgcgcaccagcgtaccagatggtgtccggctggcgttttgtagctcagggcaaatgcgatgaaagacttttaccggcagcagttgatccaccacgcggacaaactcggtgatgcacagatcgtagtcgttaacttcggtcagcaattcacgcaccagagagtcaagcactccctccatcggtgccagtaacacacgcatatcatcacccgcaaaaaaatgaggcgctatgttagcgcctatggtcagcggattaaaggtctgcaaagagggattgctgcaaactgcaatccctctctatgcttgatgtatgcctgagttcgctgcgcattgcgtaatgccggggagcgaaaaaataagcgctgatttcttaatgtgatcggtagcacgttttacgaattaattgtatgatgaatccatctcatctggggtgttgattatgagtaagacactgaacattatctggcaatatttacgcgctttcgtcctgatttatgcctgcctgtatgcaggcattttcattgcttccctgctaccggtaaccattccgggcagcatcatcgggatgctgatcctgtttgtcctgctggccttgcaaattcttccggcaaaatgggtcaatccggggtgctacgtactgattcgctatatggcgctattgtttgtgccgattagcgtaggcgtcatgcaatattttgatttgctccgcgcacagtttggcccggtagtggtttcctgtgcagtcagtacgctggtggtttttctggtggtgagctggagtagccaactggtacacggtgaacgtaaagtcgtaggtcagaaaggaagtgaagaatgatggcgaatatctggtggagtttaccgctgacattgattgtcttttttgccgcccgcaaactggcggcacggtataagtttcccttgcttaacccgttgctggtagcaatggtggtgatcattccttttttaatgctgactggcatctcttacgacagctactttaaaggtagcgaagtgctaaacgatctgctgcaaccggcggtcgtcgcgctggcctatcctttatatgagcagctacaccagatccgcgcgcgctggaaaagcatcatcaccatctgttttatcggcagcgtggttgcgatggtgacggggacttccgtggcattgttgatgggcgctagtccggaaatcgccgcgagtatcctgccgaaaagtgtcaccacgcctattgcaatggcggttggcggcagtattggcggtattccggcaatcagcgcagtttgcgtgattttcgtcggcatcctcggcgcggtatttggccatacattgcttaatgcgatgcgtattcgtaccaaagctgcgcgcggtctggcaatggggactgccagccacgccctcggtacggcgcgctgcgccgagctggattatcaggaaggtgcatttagtagcctagcgctggtgttatgcgggataattactagcctgatcgcaccgttccttttcccgattattctggcagtaatgggctaaaatttgcgatgcgtcgcgcatttttgatgtatgtttcacgcgttgcataattaatgagattcagatcacatataaagccacaacgggttcgtaaactgttatcccattacatgattatgaggcaacgccatgcatccacgttttcaaaccgcttttgcccaacttgcggataacttgcaatctgcactggaacctattctggcagacaagtacttccccgctttgttgaccggggagcaagtcagtagcctgaagagcgcaacggggctggacgaagacgcgctggcattcgcactacttccgctggcggcggcctgtgcgcgtacgccattgagcaattttaatgttggcgcaattgcgcgcggtgtgagcggaacctggtatttcggtgccaatatggaatttattggtgcgacaatgcagcaaaccgttcatgccgaacaaagcgcgatcagccacgcctggttgagtggtgaaaaagcgcttgcagccatcaccgttaactacacgccttgtggtcactgccgtcagtttatgaatgaactgaacagcggtctggatctgcgtattcatctgccgggccgcgaggcacacgcgctgcgtgactatctgccagatgcctttgggccgaaagatctggagattaaaacgctgctgatggacgaacaggatcacggctatgcgctgacgggtgatgcgctttctcaggcagcgattgcggcggcaaaccgtagccacatgccttacagtaagagcccaagcggtgtcgcgctggaatgtaaagacggtcgtattttcagtggcagctacgctgaaaacgccgcattcaacccgactctgccaccgttgcagggagcgttaattctgttgaatctcaagggttatgattacccggatatccagcgcgcggttctggcagaaaaagccgatgcgccgttgattcagtgggatgccacctccgcaacgctgaaagctctcggctgtcacagtatcgaccgagtgcttctcgcttaagcctggtgccggatgcggcgtgaacgccttgtccggcttgccagccctctcctggtgtcgaaattcccggcaaacagtttgccgtttcttgcgcaaaaccagcgggtaaagtagcctgatggaaattttccttagatcgagtctcctgcatgttaaagcgcgtgttcctcagcctgttagtcctgatcggcttgctgctgttgactgtgctcggcctcgatcgctggatgagctggaaaaccgcgccttatatctacgacgaattgcaggatctcccctaccgccaggtcggtgtggtgctcggaacagcaaaatattatcgtactggcgtaattaatcagtattatcgctaccgcattcaaggagcgattaatgcctataacagcggtaaggtaaattatctattactgagcggcgataacgcattgcaaagttataatgagccgatgaccatgcgcaaagatttaatcgctgctggtgtcgacccaagtgatattgttctcgattacgcaggctttcgtacgctggattccatcgtgcgtacacgcaaagttttcgatactaatgatttcattattatcacccaacgtttccactgtgagcgagcattatttattgcgctgcatatggggattcaggctcagtgttatgccgtaccgagtccgaaagatatgctgagtgtacgtattcgtgaatttgccgcccgtttcggtgcgctggctgacctttatatttttaaacgtgaaccgcgttttttagggccgctggtccctattccggctatgcaccaggtaccggaagatgcgcaggggtatcccgccgtcacacccgaacagttacttgaattacaaaagaaacaaggaaagtaattatggatgtacagcagttttttgtcgttgccgtttttttccttatcccgatattttgtttccgcgaagcatggaaaggctggcgcgcaggcgcgattgataaacgggttaaaaatgcaccggaaccggtgtatgtctggcgagcaaaaaatcccggactctttttcgcttatatggtggcatatatcggcttcggaattttatctatcggcatgattgtttatcttattttctatcgttaatattcccctctccagttaattattgagaataattattacttcacctgataagctgcggatatcacattcctaaccgcagctatttgtgaatcttttcacagtttaaattcccccgcacgcttagccttaatatcagtacattattatttactaaacgctcgccttaattacctatagcattaaggaagatcacatgccgcaacaaaattatctggatgaactcactccggcttttacgtctttactggcgattaaagaagcctctcgctgtttattatgtcacgacgctccctgtagtcaggcttgcccggcacagaccgatccggggaaatttattcgcagtatctactttcgtaattttaaaggcgctgccgagacaattcgcgaaaataatgccctcggtgccgtttgtgccagagtgtgcccgacggagaaattatgccaaagcggttgtacccgtgccggtgttgatgctcccattgatatcggccgcttacagcgttttgttactgattttgaacaacaaaccggaatggaaatttatcagcccggtactaaaacgctcggcaaagtcgcgattattggcgcaggtcctgccggattgcaggccagtgtgacactgacaaaccagggttatgacgtcacgatttatgagaaagaagcgcaccccggtggctggttgcgtaacggtattccgcaattccggttaccgcaaagtgtgctggatgcagagatcgcccgtattgaaaaaatgggcgtgaccattaagtgcaacaacgaagtcggtaacacactcacccttgagcagctgaaagcagaaaaccgcgcggtactggtcaccgtggggttaagtagcggttccgggctaccgctgtttgagcatagtgacgttgagattgccgtcgacttcttgcaacgtgcacgacaggcgcaaggcgatatcagcattccacaaagcgcattaattatcggcggcggtgatgtcgcgatggacgtagccagcacgctgaaagttctcggctgtcaggcggtaacttgcgtagcgcgtgaagagttagatgagtttccggcaagcgaaaaagagtttaccagcgcccgggagctgggcgttagcatcatcgatggattcacgccagtagccgtggaaggcaataaagtcacgtttaagcatgtacggttaagcggcgaactgacgatggcggcagataaaattattctcgccgtcggtcagcatgccagactagatgcctttgcggagttagagccgcagcgtaacaccatcaaaacacaaaattaccagacccgcgacccgcaagtctttgctgctggcgatattgttgagggtgacaaaaccgtggtctatgccgtgaaaaccgggaaagaagccgccgaggcgattcatcactatttagagggagcttgcagttgttaaattaatatttagagggagcttgctcatgttaacgaaagatcttagcattactttttgcggcgtgaagtttcccaacccgttctgcctctcttctagcccggtaggcaactgctatgagatgtgtgccaaagcctacgacacaggttggggcggtgtggtgtttaaaacgatcggcttttttatcgccaacgaagtcagcccgcgttttgatcatctggtgaaagaagataccggttttatcggcttcaaaaatatggagcagattgctgaacatccgttggaagagaatctggccgccctgcgtcggctgaaggaagattacccggacaaagtattgatcgctagcatcatgggggaaaatgagcagcaatgggaggagctggcgcgcctggtgcaagaagctggcgcggatatgatcgagtgtaacttctcctgtccgcaaatgacttctcatgcgatgggtagcgatgtcgggcaaagcccggagctggtagaaaaatattgtcgggcagtgaaacggggttccacgctgccaatgctggcgaagatgacgccgaatatcggtgatatgtgcgaagtggcgctggcggcgaagcgcggcggcgcagatggcattgcggcgattaacaccgttaaatccatcaccaatatcgatcttaatcagaaaatcggtatgccgatcgttaacggaaaaagcagtatttccggatattccggtaaagcggtaaaaccgatcgccctgcgcttcattcagcaaatgcgcacccatccagaactgcgcgatttcccaatcagcggtatcggcggcattgaaacctgggaggatgcggctgagtttttattgctcggcgcagcaacgttacaggtgaccaccggcatcatgcagtacgggtatcggatagtggaagatatggcaagcgggttgagccattatctcgccgatcagggatttgatagcctgcaggagatggtaggtctggcgaataacaatattgtcccggcggaagatttagaccgcagttatattgtctatccccgtatcaatcttgataaatgtgttggctgtggacgctgttatatttcctgttacgacggcggtcaccaggcgatggaatggagcgagaaaacccgcacaccgcattgtaataccgagaaatgtgtgggttgtctgctttgtggtcacgtctgcccggtgggttgtattgagctcggggaagtgaagtttaagaaaggcgagaaagaacacccggtaacgttgtaaaaccagagacgcatccggcatttggttcctgtcgccggatgcggcttgaacgccttatccggcctacaaaaccatacaaatcagtatgttgagcttattgtaggccggataaaacgcgccagcgttgcatccggcatttggctcctgttgccggatgcggcgtgaacgccttatccggcctacaaaaccacacagatcatgatgttatgtgcgtttatgaccgaatgcggaccacattcacatcatttcttacgcgcgtatttcagactatccagcgctacggcgaagataataatcgcccctttgatgatgtactgccagtatgggtttacgccgatatacgtcaggccatagttgatgacggtaaaaataattaccccggtcaccacgccaatcaccgtccccacaccgccgctgaagcttacaccgcctaccacgcacgccgcgatagcatccagctcatacataaagccgaggttgttggtggcagagccgatacgtccggcttctaacatcccgccaaaggcatagaacacgccagacaacgcgtagatcatcagcaggttcaggccgacgttgacaccagatacttttgccgcttccgggttaccgccaatggcaaaaatgttcttaccgaagcgggttttgttccacaacacccagacgaacgccaccgcaatcaacgcgtagaaggtgatgtaagagagacggaaactccccagcgcgacaaagccctgagcaaaggtagagaagccactgtcaaaaccagaaattgggctcgccccgacaaagtcgtaatagaggctgttgatgccatagacgatgatcatcgtgccgagcgtggtaatgaacggcgtcacgttgagataagcgataatcagaccgttgatcaaaccgatcaccgcaccaatggcacagacaatcagaataaccagcgcaatcggcatcgtcgccatttccgggaacactttgttggcgttatccatggactgcaataatgtcgcagccaccactgccgccagccctacctgacgaccagcagaaagatcggtcccctgggtgacaattaaccctgccacaccgagcgcgataataatacgcacgctactctgggtgagaatattacttaagttcaacagacttaaaaatgttgggtcctggaaaataataatcgccagcaaaactaaaagaacgacgtaaataccgccctctttcaggtaagtaagaaaacttttcttatttaacgcactcatgggaagcccctaatcttaaaggtgcaaagacgcaagacgcagaatttcgttttgcgttgttgtttttgtatcgacaattccggaaacgagaccattgctcatgaccagaatacggtctgttatccctaacaactcaggcatttcagaggagataataataatccccttgcctttcttcgccagttcggcaattaactgataaatttcaaacttcgccccgacatcaataccgcgcgtcggttcatcgagcattaatatttctggttgcgttagtagccagcgaccaataatcaccttttgctgattaccaccggagaggctaccaatttgcgtccgatgacccggcgtttttacccgcatgctatcaatcacccactgggtatcgcttttcatccggctgttatccagtaaaccaactttatttttgtagttgcgaatattggaaattaagctgttaaaaccaatatccagataggcataaattcccgtactgcggcgctcctcagttaccagtgcaaatccatggtttatggcttcgttggcattatggttattgatctgtttgccgtgcaacgttatggtgccagcgcttttctcgcgaataccaaataacgtctcaacaatatcggtacgtttcgcccccaccagaccggcaataccgaggatctcccctttatgcagatcaaagctgacatcgcgaatgctcggctggcgcagactcgtcaggttacgtacctcgaggatgacttcgcccggtttgttttctttgtcagggaaacgctggttaagagaacgcccaaccatcatggcgatgatcttgtccatcgtcagtcctgccagcggttcggtggcgatccactgaccgtcgcgcaatacggtaacttcatcacataactggaagatttcttccattttatggctgatataaacaataccgcagccgcgctcttttaatttacgaataatagtgaacagatgattgacctctttttcggttaagctagaagtcggttcatccataatcacaattttcgcgttataggaaaacgctttggcgatttcgatcatctgcatttggctaacggataatgtgccgacgcgcgcacgcggatcgatatcaatatccagttcgtcaaaaatcgctttggtttcgcggtacattttgtcctgatcgacaaacatgcctttggtgggatatcgccccagccacatgttatccatcacgctacgttgtaataccaggtttaactcctggtgtaccatgctaataccattttccagggcttcttttgcagaatggaaatcgatctctttaccctggaataaaatggtgccggagtctttttgataaataccaaacaggcattttaataatgtgctttttcctgcaccgttttcccccattaatgcatggatagaatgtggccggacttttaaattaacgttatcaagtgccttaacaccaggaaaggacttgttgataccgctcatttccaacaagtattccccggaggacggagtcgtactgctgaccatataattttaccttgttggccatacaataagggcgcagtaatagactgcgcccaatcagtcttatttcttgctgaattcagccaggttgtctttatctacgccaacataaggtacgcggaccactttgttgtcgattttccagttggtgccatcagccgcacctttaccatcggccaggtttttcgccagatcaaaggtcgctttcgcctggttgttagcatcgttcagtacggtgcccgccagtgcaccggatttcaccagcgccagcgcttctggcagcgcatcgacgccaaacaccggaatgctggacttgttgtgtgctttcagcgcttcaaccgcgcccattgccatcgcatcgttgttggcgataaccacttcgattttgttggcgttcgggccagacagccaggcgtccatcttatctttcgcctgagcggtgtcccacattgcggtatctaactgtaactgttcagttttgatgcctttatcgttcaattctttaatcacgtaagtggtacgtgcttctgcatccggatggcccggttcacctttcagcagtacgaactgaatctgaccgtctttgttcagatcccaaccctgattcgccgcccagtgtttagcaatcaaatcgccttgaataatgccggactctttggagtcagtgccaacgtagtaggctttgtcgtagctatccagcgccttacgagacggttctttgttgaagaaaaccaccggcacgttttgcccacgcgctttctcaatcaccgtacccgcagctgccgggtcaaccaggttgattgccagtgccttcacccctttcgccagcaatacgtcgatctgatcgttctgcttggactggtcattctgagaatcattcatcagcagctgaacatctggcgcggctttcgcatcttgctcaatagccttgcgcactacagacataaagttatcgtcgtacttatagattgttacaccaatgcgagtatcagcagcgtgtgcagcggcaccgaataacatgctggccatcacagcagacagggttaacaccttcttattcatggtatctccggtttttcttatgcagggtagtgcttgagataaatgctcggcggggcagtagagttaatgaagtgttactgaacgccgaagctcactttttaaaattcgttcttccatgcccggtaacgctccagaaaacggctttaattgttgttatgacgctgttacctcggcaaaagtgattattcactgttacatacgggttacaacgttaaaacggtgcaatcatagctatcacattgttaagatactgtgaaatcactcacagattgaaagcggttacatcgcctgatttgtactgttagtgatcgccgccgcattctggcgtgttgcgacagaatggcgacgcactaacgtcggcataaaacagtggctggcacgaggatcaatattgcctgctgccccctgcaaggccagttcggtggctaatttcgccatactagcaatgggataacgcacggtcgttaattgcgggtcggtgtaacgggcgatgggaatatcatcgaaaccgatgatactgagatgtaacggaatcgcaatgccattatcttttaatgctgtcagtgcgccagcggccatattgtcgttataagcaaatacagcggtaagttgtagattgcgccccagcagttcaaccatcgccgcctcaccgcccggcatgtccggcgtaccagcgccaatccagctttccggcggaataatatcctgctctttcaacgcactcatccagcctgctttacgcatggcgtcatcttcaatgccgtggctggaagaaagataaccaatacgttgatgaccgttattcagcaacatgcgcgtcgccattcgggcaccgctgagattatccaggcaaacgcaacgatgggcgtaccccggcacaacgcggttgattaacaccataccgggaatgttatccataaattgcgccagttcatcgtcactcaatgctttactgtgaacaatcaacgcattacaacgctggcgaattaacacctcaatggcgtgacgctctttttccgcttcatgatagctattgccgattagcacgtatttctgatgctgctgagcgaccagatccaccgcttttaccagcgcgccgaaaaacgcatcagaaacgtccatcaccaccacgccaatggtgtcgctaacctgagttgccagcgcctgggcattggcgtttggccgataatccagctcactcacggctttcattactgcttcacgcgtgtcggcactgaccagcgtgctgttattgagcacccgggaaaccgttgccacagagacgccagcctgacgcgctacatcacgaatggtgatcatattcactacctgttatgagattgcagtaaatgactgcttgctggcggctattttgtcagcactgaatacaggacttcgtgaatcgagtcacagcaatggaaacggttacagccgttttgttaacgaatgtgatccagatcgttatctacttgttttagatattgccggtccggcagcacgcaaagttaactgacgccagagccattccaccggcccctggcggaagtaacgcagccagataacagagaagaggatattcgccagccataccggaataacaaacgccagcagctccaggcggtcaaaatgcataaacaaaccgaggtggtaaaaaagcgtggtacaaatcagcgtttgcaatagatagttggtcagcgccatccgtccgacgcaggcgatcgcaagcaccagcttaaagcggctcaattgcggccagaagccataaaacaggctcgcatagccaatcgcctgaaacggcgcactcagttcccgcggcatttgaagtaagaaggcacaccagcgatacgcccagtccagctgccattgcagggcgatggcaggaaggttaatggtcaccccaatcgccaccagcacaaaaccagtacgacgatagtgacgtaagctgaactgccctttcagccagccgctgcgcatcagcgccgcaccaatgagcatcatccctgccagttgccagccatactgtgcgcccagtgccagtaaactgttgccaacaccatcggcacgattactgatcgcttcaacgccgccgtgaagcttccagtatttttcatacaaaatagcgcttgcatccggcgtccaggcgcggctggtctggctgtcggaaatcagccccaataacagcaaaacgccaagccccaccagataaagcatgacgcctgtattaaacaggctttttacgcttggcgcatcgcgcaccagccgccagcagattaagcccaccagcccgtaagccagcaaaatatcgccgtcccagaacaataaaccgtgaataaagcccaacaagactaacagcgttaaccggctctggatccagcgtctgccacggggcagcaacatttgcaggcccgcaccaaacagtagcgcaaaaagcgtgaggaatttcacctggccgatgagatcaagaaatgcccaagtccatgcatcccgcggcgtaatagcaccgtaccaggcgggattgagataagccgcctttggtagcccaaaggcgctgatgtttaatagcaggatccccagaatggcgacgccgcgaacaaaatcgagcgtgacgttgcgctccatggttcctgccttttaatcagttgtgatgacgcacagcgcgcagaaactcgtggcgcgtattctgactggatttgaacaatccaccaagagaggtcgttgtcgtggcactggttgcatcgcggatgccacgcgccttcacgcagtaatgcaccgcgtcgatgctgacagccacgttattggtgcccagcagcgtttgtagcgcaataagaatttgctgcgtcagacgttcctgcacctgcggacgctgggcaaagaactgcacaatgcggttaattttactcagaccgatcacgctatctttcgggatataggccaccgtcgctttgccatcgatggtaacaaaatggtgttcacaggtgctggtcagagtgatatcgcgcacggtgaccatttcatcgaccttcattttgttttcaatgagggtgattttcgggaaattggcgtaatccagaccggagaaaatttcatcgacatacattttagcgatgcgatgcggcgtttccatcaaactgtcatcagccaggtcgagattcagcagctgcatgatttcggtcatatgaccagcaataaggcttttgcgcgtttcgttatccatttcatgcacgggcgggcgcagcggtgtttccagtcctcgcgcaactaacgcttcatgaaccagggccgcttctttactgagacttggcatttatgatttctcctgcaggtgtgacgcctccgccctgcgtgggggcaaagttattaagctgatttacagcctgattattgtgcgtgaggcggcgcacataatccagtattcacagcgataattattgtaattgccgctgcctttcatcagcagatgttaaaacatcgttatgcaaatacggaagtgaaagttactcacagcacattgaataaacggtatgatgaagaaattgcaaacaacacaacaaggagccacgcatggaaatgctcgaagagcaccgctgttttgaaggctggcagcaacgctggcgacacgactccagtaccttaaactgcccgatgacgttcagtatctttctccctccacctcgtgatcacactccgccaccagtgctgtactggctttccggattaacctgcaatgacgagaacttcaccaccaaggcgggtgcccagcgggtagcggcggaactggggattgtactggtgatgccagacaccagcccgcgcggcgaaaaggttgccaacgacgatggctacgatttaggccagggcgcaggcttttatcttaatgccacgcaaccgccgtgggcgacgcattaccggatgtatgattatctgcgcgatgaattaccggcgctggttcagagccaatttaatgtcagcgaccgctgcgccattagcggtcacagtatgggtggtcacggtgcgctgattatggcgctgaaaaatccgggtaaatacaccagcgttagcgcctttgcgccaattgtgaatccgtgcagcgtcccgtggggaatcaaagcgtttagcagctatttaggtgaggacaaaaatgcatggctggaatgggacagttgcgcactgatgtatgccagtaacgcgcaggatgcgatcccgacgcttatcgatcagggcgataatgatcagtttcttgccgaccagttgcaacctgcggtactggcagaagccgcgcgccagaaagcgtggccgatgacgctgcgtattcagccgggatatgatcacagttactacttcatcgcctcttttatagaggatcacctgcgcttccatgcgcagtatttactgaagtgaaagtccgcccggttcgccgggcatcttctcatcagaagcgataatccactgccataaagtaacgacgtccgtcttcgttatagctgtagtcgtcacgactgagatccttgtcgccaaggttcagcacgcctgcgcgcagtttgacgtctttagtcacctgccaggccgcgccggtattccagatggtataaccgcccggtgttttagccgtcgcgctgtcggcgcgtttctgcccggtatagtgcccagaaacatagaaactccagtcttccagcgccagcggtttccagtccagcgtaccgttagcagtatggaacggcagatcggatagcggtttgttttcgccgttgctgacatcacgaccatcgttgtaggtgtagttgatgctcagtttccattcatcgttgaacggaattttcagttcggtttccacgccctgaatacgagctttgttaacgttgtagtagctaaataccggtatgcgccgtccgttagcgcccgtctcaaaaccaacaaagttttggtagcccggtgcagcgttgacgtcagacgtacggctgatgctgatacgatctttcacatcgttacggaaaacggtaacgctggattcaaccccttccagccagccttcttcacccatgtagtaaagccccagctcccaactttcgctggtttctggtttcagatccgggctacccacaatcttacatgcgccacggcaggaattgctcgtccagtcagggctaagttgcaacagagaaggtgctttaaatgccgtcgcccagccccctttcaccgttacggtgtcggtggcgttataaaccaggtaggcacgcggactccagtgttcaccgtaggtttcgtgatcgtccatacgcacgccggtcgtcagcgccagcggctcgaagatccgccattcatcttccacaaacagcgcgtactggctggcagacgttttggagctggttcccccggtcaggttcaccgcatcgctaagtttgtcgtgacgccattcaccgccaaccgtgagaaactgattaatcgccgtcagcggcaacgtgtatttgccgtcgaccgtattgctttcggaagttatcgggctgctgttgccagggtttttgttctcgactttctcaccgtagtatttcagttcgctggtgccgtaatcccaacgcccattatggctgacggagtagttctggcgttccaggcggtttttgtccaggctgtcggaatcacgatcctgacggtcgaaaccgtatccggcagtaaaatcgtgattttgattcggtgtccaggcaaattcgacattgccgtcgcggctggagaatccttcaatacgcggcgtttctccggtatcggtggtcgtactgttttgcgggtcatccttttcacgttttgccaggctgccgtaagctttcattcccagcacaccatcaattaatggtccactggtaaagaactgaccgttataggtgtcaccgcgatcgcgatgttcctgaatggtggtatcgacggtaacggtaccgctccatttctgaccgatttttttggtgatgatattcactacaccgccgagcgcatcggaaccgtacaggctgctcatcgggccacggaccacttcaatacgttcgatggaatcgaccgggatccagttcagatcgaaatcattgtggcggaagacggcattgcgggagttcacgcgtttaccgtcgacgagaatcagggtatagctgctgtccagaccacgaatactaacgcccttacggttatccccttcgttcgtcagttgtacgccaggcacttctttgaggacatccttcagattctgtaccggttttcgctgcaggtcttcctgggtaatgacgctgatactggcaggtgcatctttaagattttgttccacggaagatgcagtgacaaccatcgtttcgccatcatcatcgaccgctaacacaggccatgcacaagaaatagcggacaaacacagcccgacccgtacgaaagggttcaacctaaacattccatatctccatgaggtaactacgaaaataaaatgggttatcgctcacatcttcttcacgtccccttgcgtacggcagcatcgcggtggacttattttttatgcaggtgatcatcccagaaagccggaacagcctctgatttgtcagccttttttgattgcggcgtaacgataatgcaaacgataacaattatcaatccaaatgttaaattttatatccgcatgatttgtcagggaaatggaattgaaaaagccctctcggttgagagggcttagcaaggaagggaggaaacttatttcttatcgttctgcgggaacttcatttcgctgtagcgtacgaagtgagttcctttaatcagcttgtagccgaaccaaataatcaggaacagcgggataccaatatacgttgccgctacgccgccccagtcaatagtatctttcaggaacgcttcgtagttctggcccaaagtgataatcagacacagaatgaatgcgaagatcggccccagtgggaagaaaccactacggtacggcagatcgttaatgtcgtgtccctgcaatacgtaaccgcgacggaagcgatagtggctaatggcaatccccagccaggcgataaaacccgtcatcccggaggtgttcagcagccacaggtataccgtctggttgccaaacatggaggtcaggaagcacagaccggcaatcaccgtcgtcgcatacagcgcattacgcggcacgccaccacggctcagtttagcgaaaatgcgcggcgctttaccgtcacacgccagggtgtacagcatacgagtagacgcatacataccggagttacccgcactcagcaccgccgtcagaataactgcgttcatcaccgccgccgcagagagcagacccgcgtgctggaacaccagggtgaacggactaacgctgatgtctttaacatcgttacgcagcaggctcggatcggtgtacggaataatcaggctgataatcaggatcgcgaacacatagaacaacaggattcgccagaacacctgacgtaccgcgcgtggaatgtttttcgccggatcttcggactcgcctgcagcaataccgatcagctcggttccctggaaagagaagccgacaatcatagctacgccgatcatcgccgcaaaaccaccagcaaacggcgcttcgccgattgtccagttgctccagcccgcaggctgcgcgcctttgaagataccgataatcatcagcacgccaacgatgataaagacaataactgtcgtgactttgatcagactgaaccagtattccgcttcaccaaagccacgaacactgatgtagttcagcaggaagataacgccgaggaacaacgcactccagatccagcccggtgtatccgggaaccaccagctcatgaccagctgagctgcaaccaggtcaacggcgatagtcaccgcccagttgtaccagtagttccagcccagcgcgaagccaaagccttcttcaacatagttctgaccgtaagtggcaaagctaccggaaaccggcatatatgcagccagttcaccgagactggtcatcaggaagtaaaccatcaggccaatcagcatatagctgagcaatgccccgcccggacctgcctgagaaatcgttgcgccagaggcaacaaaaagacctgtaccgatggaaccgccaatggcaatcatcgtcaggtgacgcgcctttaattcacggcgtaagcccggcgcttctgtggttttagtttcggaaaccatacaaaaatgctatccatcttaaaaatgaggcgcgattgtagcagacgattggcaatccttccggcagaaatacacggttataagacaccttcatgatcgcccagggattataagtaaagcagccaatctcttttctggcgaatgcatgctgaaggcgctgcgtcacgaaatcgacacagcaccagcatgttcttgtacagcaacttaacgcggcacatttgcgggatcgcaatagtccagaaagcgccgtagcgcgttggaaaggtgtttttgccgatgatgtatacgccacaacgtacgcatcaggcgcggcagagggaccgcaacttcacttaatgtgcctgcctgcaattgatcttcaatcacacgtcggctcaggcaactaattcccaacccatgacgcaccgcatgtttgattgcctcggagttacctaattccatcgccatctcaaacttcggtaaatgactcagcaacagataatcgacaatctcccgcgtgccggaaccgcgttcacgcaggatccacggcgcagcggccagctgttctaaggtgaccggaccacgggccaacgggctagtcggcgcggcgaaaaccaccagctcgtcttccagccacggttcagaaatgatttcagtgctgtggcacggtccttcaataaagccaatatcaacgcggaaatccagcaccgcttgcatcacgtcctggctattcccaacgctaagttcaatcggcaactgcggataatcatggcgataacgggcgataactgcaggcagaatgtagttaccgatggtactactggcatagatacgaatcgcgccgttgtcttcgcgaaacagttgttcgatttcaaccgcctgttcaagcaatgccaacgcacgcggatagagcagccgcccgtgttcattaacaaccagtcttttccccacgcgatcaaacagttgcacgccaagctgcccttccaggtcggtcaaggctgcgctcactgcactttggctcaacgccagcatcacgctcgcctgggtggtacttccacttttcaatacttctgcaaaaacttccaactgccggagggtgatgtgcatagtcgcttaccacttataaagattaattataaatatataatcaattttatttttaaaccagttagtcgtaaccttatgcccggttaaaggagagggttatgacgaatatcaccttacagaaacaacatcgtacactgtggcattttattccggggttagccctgagtgcagttatcaccggggtcgccctgtggggtggttccattcccgcggttgcgggtgccgggtttagtgccctcaccctcgcaatcttgttggggatggttttaggcaacaccatctatccgcacatctggaaaagctgtgacggtggtgtgctgtttgccaagcaatatttattacgtctgggtatcattctttatggcttccgtctgacgttcagccaaattgccgatgtcggtatcagtgggatcatcattgacgtgttgacgctgtccagtaccttcctgctggcttgcttcctggggcagaaagtgtttggtctggataagcacaccagctggttgatcggtgccggtagcagtatctgtggtgctgccgcggtactggcgactgagccggtagtgaaagcggaagccagtaaagtaaccgtggctgttgcaaccgttgttatcttcgggaccgtcgcgattttcctctacccggcgatatatccgctgatgtctcaatggtttagtccggaaactttcggtatctacattggttctactgtgcacgaagtggcgcaggtggtggcggcaggtcatgccatcagcccggatgcggaaaacgcagcagttatttccaaaatgctgcgcgtgatgatgctggctccgttcctcatcctgctggcggcgcgtgttaaacagctgtctggggcgaacagcggcgagaaaagcaaaatcactattccgtggtttgccatcttgttcatcgtagttgccatctttaacagcttccacctgttaccgcagagcgtggtgaacatgctggtaacgctggataccttcctgctggcaatggcgatggcggcgctgggtctgaccactcacgtcagcgcgctgaaaaaagctggggcgaaacctctgctgatggcactggtactgtttgcctggctgattgttggtggtggtgcgattaactatgtgattcaaagcgtcatcgcataaaccactacatcttgctcctgttaacccgctatcattaccgttttcctccagcgggtttaacaggagtcctcgcatgaaatacattggagcgcacgttagtgctgctggcggtctggcaaatgccgcaattcgcgccgccgaaatcgacgcaaccgcgtttgccttgttcaccaaaaaccaacgtcagtggcgtgccgcaccgctcacgacgcaaaccatcgatgaattcaaagccgcctgtgaaaaatatcactacacaagcgcgcaaattcttccccacgacagttatctgattaacctcggacatccggtcactgaagctctggaaaaaagccgcgatgcctttatagatgaaatgcagcgttgcgaacagctggggctttctttgctcaacttccaccctggcagccatctgatgcagattagtgaagaggattgccttgcgcgtattgccgaatccatcaacattgcgctggataaaactcaaggtgtgacagcggtgatagaaaacaccgccggtcagggcagtaacttagggtttaaattcgaacatctcgcggcgattatcgacggcgtggaagataaatcccgcgtcggcgtctgcattgatacctgccatgctttcgctgccgggtatgatttgcgtactccagccgaatgcgagaaaacattcgcggattttgcccgtactgtcggctttaagtatctgcgcgggatgcaccttaacgatgcgaaaagcacctttggcagccgcgttgaccgccatcatagcctcggtgaaggcaatatcggtcatgatgcgttccgctggatcatgcaggacgaccgtttcgacggcattccgctgatcctcgaaaccatcaacccggatatctgggcagaagagatcgcctggctgaaagcgcaacaaactgaaaaagcggtagcctgaagatgaataaccgggaaaaggagatccttgcaattttacggcgtaacccgctgattcagcagaacgaaattgcggacatgctgcaaatcagccgtagccgcgttgcggcgcatattatggatttaatgcgcaaaggccggattaaaggcaaaggttacattctcaccgagcaggaatactgcgtagtggtggggacaatcaatatggatattcgcgggatggcggatatccgttacccgcaaagcgcttctcatcccggtacaattcattgcagtgcgggcggcgtgggacgcaacatcgcccacaatctggcgctgttaggccgtgacgtccatttgcttagtgtgattggcgatgacttttatggcgaaatgctcctggaagaaacgcgccgtgccggcgtgaatgtctccggctgcgttcgtttgcatggtcaaagcacaagcacgtatctggcaattgccaatcgagacgatcaaaccgtgctggcgattaacgatacccatctgctggaacagttgacaccgcaactactgaacgggagccgcgatttacttcgtcatgcgggcgtggtactggctgattgcaacctgacagccgaggcgctggaatgggtctttaccctcgctgatgaaatcccggtgtttgtcgataccgttagtgaattcaaagcgggcaaaatcaaacactggctggcgcatattcacaccctgaaacccactttaccggagctggaaattttatggggacaggcgatcaccagcgatgctgaccgtaataccgcagtgaatgcattgcatcagcaaggtgttcagcaactgtttgtttatttgcccgatgagagtgtttattgcagcgaaaaggatggagaacaatttttgctgaccgcgccagcgcatacgacagtagacagttttggtgctgacgatggttttatggcgggcctggtatatagctttcttgaaggatacagtttccgcgacagcgcccgttttgcggtagcctgcgcggcaattagccgcgccagcggcagcttaaacaaccctaccctgtctgccgataacgcgcttagtttagtgccaatggtgtaacaatgttgccggatgcgacgcttaacgcgtcttatccggcctacaaatcaggcaatttcagcaagtaaatgtaggcctgataagcttgcgcatcaggcaatgacactcaagctaaaccaataaagaacccggcaatggtcgcactcatcaagttggaaagcgtcgccgccgccagcgcccgtaaaccaagctgggcgatttccggcgcacggtgtggcgcaaccgcagaaaacgcccccaccaccaccccgatagaaccaaagttagcgaaaccgcacaacgcgaaggaaataatcgccacagttttagcatcgagagtgccagccgtttgcagatagggactgaaattgagataagcgacaaattcatttattgccagtttctgtccaatcaaactcccggcaagattcgcatcactccagtccacacccatcacccacgccagtggagccagcaggtaacctaaaatggactccaggctggcatgttcaaaaccaaaccagccaccaacgccgccgataataccgttaatcaacgcaattattgcaacaaatgccatcaccactgttgccacacctgcggcgattttcagcccggtcattgcccctgtcgcagcggcttcaataatgctttttggcggtgtttcggtgaaagagaggttattaaaggaaacctggctagattccgttgccgggcttaacaggcgggcaaacaagatcccgccagggatcgccattaaacttgccgccagcagatattccacaggcacgcccagtgcggcgtaaccaatcattgtgctaccagcaatgctggccatgccactacaaatcgctgtaaataattcattgcgattcagacgatcgataaagggtttgacgattgccggaatttcgttttgcccgaggaaaatggtggtgaccgcgacgaaactctcgatcttgctgatatttaatgctttctggaagataccgccgagaattcgaattaaaatccccatcacaccgatgtagtagagaatactcaccagcgcggtgacgaagataattgccggtaacaccctgaaaccaaagataaatcctgcaccatcaaataaggtatccattttcggtccgaccagagaaccgaagataaatgcgctacccgcgtcgctgtacgccatcactttatgcacgccaaaagcgactttttcagcgacccaacgccctggcggtaaccaaagcataatgccgccaatcacgacctgtaacactaacgccgcgccaacggtacgcaggctgatcttcttcttgtttacactcagtaaaaacgcaatcgtcagcaataccaccattcccagaacacttctcatgacatccatagtgattatctcttcatgtcatattgggcgacggctttctgcccatcagaaatagccaggcctgcatcttgcgataccggcccggcttgttatcaacacttaatgggttttgatgtagccgcgcacgcactcttcgactaatccccagaaccagtctgtatcaatagtgatgccgactttggtattggcgggcttgccaagaacgcccagctcgtcgcagacggtacgcccatagcaagggccactgttgacgtccacttcgacgtacatctcctgggttttaatgccatcagggttaatcagataaccgatgcaggtggcgtcgtgcaccgggccgccagcaaggccgtagttttcgaactgcgttttgagagtgaagttcatgatgtcgctgaacagctctccggcggggccgcctgccctttccatccgagcaatcacgtccggggtgcaaacggtctggttggtgagatcgaggcccatcatcactaatggaacgccggaggtgaacactacgcgtgcggcttccgggtcggcaaagatgttgaactcggcagatggcgtgaagttgcctgtaccgtaagcgccgcccattagcacaatttcacggattttgggcaggatcgcgggttgcatacgcattgccaccgcgatattactaagcggaccaaccggcaccagagtgatatcgccatcgcttgccatcagggtatcaatgatatatttcaccgcatgagtgctttctgcctggcgggtcagcggctcgaataccgggccatccagtccggtttcaccgtgaatattatcggcaacgatttgttgacgcataatgggctgcggcatccccgcataaaccggaacattaatctccagtttctggcaaacattcaggccattaattaatgttttatcaagcgtctgattacccgctacaatagtgatgcctaataaatctattgccggatgtttcgccgccatcattatagcaatagcatcatcatgacccggatcacaatccagaataatttttctcttttccattgtttatttcctctgtttccagttgcgttattttttctacagcaaagaaaattcgaccgggccgatgattgaatcttaacaacagcgtacgtatgctaaatatgagaaatctcatagcggataaacatcgtgaaagaaatccacaataatgatcttaagcagcaattgatgagtgaatccgcgtttaaggattgctttttaacggatgttagtgccgatacgcggctgtttcattttttagcgcgtgactacattgtgcaggaagggcaacagccgtcctggctgttttacctgacgcgaggccgcgccaggctttacgccacgctagctaatggtcgcgtgagcctgatcgatttctttgccgccccctgttttattggcgagattgagttaatcgataaagaccatgaaccgcgtgcggtgcaggctattgaagagtgttggtgccttgcgctccctatgaaacattaccgtccgctgttattaaacgacacgctatttttacgaaaactctgcgtcaccttaagtcataaaaattatcgtaatattgtttctttaactcagaatcaaagttttccgttagtgaatcgcctggcagcatttatattactcagccaggaaggtgatctttatcacgaaaagcatacgcaagcggcagagtatttaggcgtttcttatcgacatcttttatatgttctcgcgcagttcattcacgacggtttattaattaaaagcaagaaagggtatctcattaaaaacagaaagcagttgagtggactggcgctggagatggacccggagaataaattctccgggatgatgcagtaaaaattattttcaatagcgcgattgccggatgcaacgcttaatacgttttatccggtctacaaatcgagcattacgccagaccaataaagaacccggcaatagtcgcactcatcaggttggaaagcgttgctgctgccagcgcccgtaaaccaagctgggcgatttccggcgcgcgttttgggctaatagcgctaaatgcgccaacgacaacaccgatagaaccaaagttagcaaaaccacaaagcgcaaaggagataatcgcaatggttttcacttccagcgtgccgcccgtttgcaggtatggggagaaactcaggtaagcgacgaattcgttaatcgccagtttctgcccaatcaggctacccgcaagattggcatcactccagtccacacccatgatccacgccagcggtgccagcacatagccaaaaatactttccagagaggcattggcgaaaccaaaccagccgccaattccgccgataatgccgttgatcagcgcaataattgcgacaaacgccattaccaccgtcgccacaccagcggcgatttttagcccggtcatcgcaccgctcgccgccgcttcgataaagctttttggcggcgtttcgctgaagctcagattttcaaatgtgacctggctaggctcggttgccgggctaagaatacgtgcaaacaaaatcccgccagggatcgccatcaggcttgccgctaacaggtagtcaattggtacgcccattccggcataaccaatcatcatgctaccagcaatggacgccatcccgctacaaattgcggtaaacaactcgttgcgattcatgcgatcgataaacggtttaacgatcgccgggatctcattttgcccgaggaaaatagtagtaaccgcaacaaaagattcgattttgctgatgttgagggctttctggaaaatgctgccaaggatgcgaatcagcagccccatcacgccaatgtagtacagcagactgatgagcgcagtaacgaaaataatcgccggaagtacgcgaaaggcgaagataaaacccgcaccgtcaaacaggacatccattttcggcccaaccaggctaccaaaaatgaaggcgctaccggcatcactgtaagacatcactttatgaacgcctaatgccgcctgttctactgcccattttcccggtgggaagtagagcatgatgccaccaatagcgatttgcagcagcagtgcggctccaaccgtgcgcaaactgatgctctttttattcacactcaacagaaatgctattgccagtaacaccaccatccccacaacacttctcattatatccataatgattttcccttcatgccggtaaacccggcgtcagcgccaggttttggtatgcttgatgagtacgggcgacggctttctgcccgtcagaaattaacccgcgagacgctgatattctttggcaatttcgctcgccagaatggcgttgttgaacaccagctggatgttggatttcaggctgtcaccgccggtcagttcagcaacgcgcgccagcaggaatggcgtactttctttaccaatgactccctgagcttcagcttcagctaccgcctgatcgatcgccgcattgatagtgtgttccggcatagcaaactgttccgggatcgggttcgctaccacgaggccaccgttcagaccgctttgccatttcaccaccattgcacgggcaatttcgctggcgctgtcgagacgaatgctgacgtcaaacgggctggtgcggcagaaaaacgcaggcagcgctttagtctgatagccaattaacggcacaccgaaggtttctaaatactcagtggttaatcctaaatcgagaatagatttcgccccggcacaaacaacggtgacattagtatttgccagttcttgcaaatcggcagaaatatcgaaggtatgttccgccccgcgatgcacaccaccaattcccccggtggcaaatactttaattccggcaagcgccgcaataatcatcgtactagccacagtggttgcgccattttttccggcggcaacaacaaaaggtaaatcgcgacgactaactttggtcacgttatgcccttcacgacccagtaattcaatttcttctttgcttaaccccactttcatcacgccgccaataatggcgatcgtggcaggtacagcgccctgtttacgaatagtttcttcaacttcaattgcggtctgggcattttgtgggaacggcatcccgtgagaaataatggtgctttccagcgccacaaccggttttttgttttttaaagcgtcctgcacttccggggaaatttgtaataattcaggggaaatttttaattcagacattctgcgttctccactaagcttataacgttggcaatgcttaaatcggggttattggtgtattcacaggagagcgccatactgctacatccctgtgcgaaacgaacagattcggcaaacggcattccgtctacccaacagctagcaagtcccgccatcatggcatcgcccgctccggtaacattaataacattggttttgatcggcgcagaccagccactttcaccgctgatatcgctgtaataaacgccgtcgccgcccatgctcaataccagtcggttcaggccatgttgatggaaccaggcagcaacttttgccacatcttcacgcccactcagcgcaatcccactcagggtttccgcttcaaggcggtttggcttgagagtgtggatctgatttagacggtcgcgcactttgacacatttccatgcgctaaccggatcgacaaatacgggtacgttggcggcattatccagaatccatgccagtgcctcttcactgatattacagtccgcgacaatgacctttgccctctgaataaattcaccgtgctgtgcgagatattcagctgtaatagcgttgctaatattcatgtcatttatagcaaccagcatttcaccggtattatcgagtaaacttaaataactgctcgtattttctcccggcacaatcaggcatttatcgacataaacgccagattgattggtttgcgttagcaggctttgaccataaaaatcactgcctacggcgctcagtagccaggctttgttacccagcaacgccaggttttgtgcaatattgcgccctactccaccaggcgtaaattttattttacctggattactatccgcataatttaaactttcatgactatatccggcgacatcaatattcgcgctacctataattacgacataatccttttcgcgcatagcacgtcctctggtaaaaaattaccaaccctgtcaatccacaagaatatagatactgcaaagacggtttaaacatgtgttcatatttaaacatgtgctcatagtatgcatgttttacgtaaagtaaattaccgccagagaggcaaaatgggcagatttgagcaggctcacaaaatgcgattaaatgcctgaattacaaaagcgaggaatttgtgacgggatgcacagaacagaacaataaaaaagggcagaaaataatctgcccttgaggaaataacctgagtgtttgatgaacgtttgaagtttctactgaaagataaaaccatttaaattcataaaattacattcacaaaccggtcattctctttgcgctcatcaaatgttacaggacaggaaatttctgccctgtaacacaccttttattacgctgctttcgctactgcgtccacttccggacgtttcaggaaggcataggccaaacccgccaccagcgtaccggcaataattgctaccaggtaacccaataccggcgtaatagcgccagggatcagcagaacaaacagaccaccgtgcggtgccatcagtttcgcaccaatcgccatactgattgcgccagtcagcgccccacccacgatacagcacggcagcacacgcatcggatcacgagcagcaaacggaattgcaccttcgctaatgaagcacagtcccaataccagagcggctttgccaccttcctgctgcgctttgtcgaatttgcgacgcgccaccattgttgccagacccattgccagcggtggcaccatacctgccgccataatcgccgccatcgggccataggtttgagtactcagcagacccacaccgaatgcgtacgctgctttgtttaccggaccgcccatgtcagtacacatcatgccaccgaggatcgcccccagcagaaccgcattcgcagtccccatggtctgcagccagtgagtcagcccttcgagaatgccagcaactggtttaccgatcaggtagatcatcgccagaccgaccaccagactggaaattagcggaatgatcaggatcggtttcagcgcctccatactctgtggcagtttcaattgcgtactgattaacttcgcaatgtaaccagccaggaagcccgcaataataccaccaatgaagccagaaccggtgctgaccgccagcataccgccaatcagacccggagtgaggcccggacgatcggcaatggaaaaggcaatataacctgccagtaccggcaccatcagcgcaaaggcactaccaccaccaatctgcatcagcgccgcagccaacgtacccggctctttaaacgcttcgataccaaaagcaaaagaaagcgcgatacacagaccacctgcaacgaccatcggcagcatgtaagaaacgcccgtcagcaagtgacggtatgcgcctgcactctctttcttactttcagtggtcgccgtttgagctttgcccgccggttcatacggcgttgcttcagcaaccgctttatccagttcctgcgcggttttcttcagcgccagaccggtagaggtacgatacatcggtttaccagcaaatttcgccagatccacttcgatatctgccgccacaatcaccagatccgctgctgcgacttcttcgggagtgattgcattacccgcgccaacagaaccacgggtttcaactttcacccaccagccacgttttttcgcttcggtttcaatggcttcagccgccataaaggtgtgtgctacgccagtcgggcaagcagtcaccgcaactacgcgtttcggaccgctggcggcaactggtgctgtcgcagcgaccggcgcagtgtaaggtttcgcatggcctttggcttcactcaggaacagctcagggtgcgcaactgcccgggaaatatcgcccagccagacatttttaccgttcagcgcgctgtcgttcgggatggaatcaccgagaacaatcgccatttcagcgtcgttcggattgtcgatgatttccagttttgcttttcgcgccgccgcgcccagcagggtcttcgccatataggcgcgtgcctgaccgagattagcgtcaataatcagcagcgttttcattatgcctctcctgctgtcagttaaaaggttgtaagtcgacgcgcgccatcattgcggccaactgcggacgatcggtaatacccacattgctttgacttaccgccagggctgcaacagctgtcgccagacgcagtgtgtgttcactggattcacgcatcagcaagccataaatcaggccaccaaccatagaatcccctgcgccaacggtgcttacgacatcgacactcggtggtttggcgatccattcgccggaggcattaacccaaagcgcgccttcggcacccagactaataacaacatgcgcgatgccttgttcacgtagcgcatgtgcagcttcaatcacatctttcatttcaggcagtttacggcctgcccagatttccagctcgcggcggttaggtttcaccagccacggtgccgctttcaaacctgctactaacgcttcacggctactatcaaagataatgcaaggacactgactacgcaggcgagtcatccagtcggtgaacgcttccgggctgacgccactcggtaagcttccgctgacacagaccatatcgaactgaccgagccagctcagagaatcagtcacaaagcgttcccagtcggcgggggtgacttcaaaaccgctgaagttgaagtcggtcacttcgccgtctttttccgtcagcttaacgttaattcgggtgcgcccctgtacaacctggaaacggttggcaatgcccagctcgctgaacagttgctgaaaaccatcctgattgtctttacccaggaagccgccaacggtgacatcaattcccaggtcttttaatactttggccacgttgatgcctttacccgccgcatgcagaccggtggttttcaccaggttcacttcgccgcgttcaatttccgggcagaaaccaacaaggtcataagccggattaagggtgatagtagcaacacgtctgctcattatgcgccctccccaagaccagcagcgatagcgtcgccgattgctttcagcgcctgttcagcatctgcaccctgggcggtaaagcgtaggcgatgacctttcttaacgccaagtgccacaactttcatcagactacgtccgtttgccggtttgccggtaccatcaaggtttgtcacggtaatatcactgttaaattgtttaatggtattgaccagcatggtacctggacgagcatgcaggccgtgttcattgcgcaccacaaactccgcgcttaacacgtcgtcggtcggcgcatcatcgctggtcagcagcgccagcaacgttgccgcatccgctttcagcaagcggtcagctttattgtcgagcaataaatcagcgagacgcttaagaaccgcgatgggctgatcgtcattcatcgccacactcaccagcatggctgccgtttcgccgtccacatcaaaagcatttgccgcacggcttaccgcaatcgcgctacgcagattgccttcggcgctatcgctcagccagataccctgtccgagattcagcggttgttcattgatggctttggtgacgaaagtggcgtcaactgcccccgcctctttcagacgcgcagcgttcagcgcctgaagagtcagcagatcgctggcgacgatatccagtgtcagcatttcgttgtcgagcttcagctgctcactctgcttttcgcccatcagtaatgcgcgaagttcttctgctgttgttgcactcttcagttgttcagcaacggaatcatcgctcagtacgtgggtcagctggcgtagcaggcccagatgttcatcgctgctggcagcaataccgattgccacgtacgctacctgaccgtcaccccaggtgacgccttccgggaactgaaatacctgaacgccggttttcagcacctgatcgcgggtgtcggtagtgccgtgtggaatagcaataccattgccgaggaacgtactggtttgctgttcgcgcgccagcatgccattgacgtagccttctgctacattaccggcctgcaccagcgccgcagcgacctggcgaatcgcctcttctttgtctccggccttttcgcccggatggatgtcctgtacggataactggaacatagttctcctctcttgctgaattgaaacgattcagcctctatgagaaaaaaagcgccaacctggcttagggttaaagacaagatcgcgctgaaacgtttcaagaaagcataatacttctgtttcagcacgcaaggaaagccgtaaagttatgagcaaaagtttgatgtgctgcacaattttttgccatttttcctaattgctgatgggaaaatccgttatcagcaatttcatttcagcagcgtcagcagccaatcagcaacagtgaaatggcattttgactattcgtggcgcttttgatttcgctgtctgtttattttctgacaagcagcgtaaactccgcgtcttcctcttccagtgatcgaccagcatgcataactcccccgcagtctccagcgcgaaaagctttgacctgaccagcacggcgtttttaatcgttgcctttctcaccggtattgcgggcgctctgcaaaccccgacactcagtatttttcttaccgatgaagtacatgcccgtccggcgatggtgggattcttctttaccggcagcgctgtcattgggattctggtaagtcagtttctcgccgggcgctctgataagcgcggcgatcgcaaaagcctgattgtcttttgctgcctgttaggcgtgctggcctgcaccctttttgcctggaatcgcaactactttgttttgctattcgttggcgtctttcttagcagctttggcagcaccgctaacccgcaaatgtttgcccttgcccgtgaacatgccgacaaaaccggacgtgaggcggtgatgttcagctcttttttacgcgctcaggttagtctggcatgggtcattggcccaccgctggcttatgccttagcgatgggtttcagctttacggtaatgtatctgagcgcagcggtagcgtttattgtttgcggtgtgatggtgtggctgtttttaccgagcatgcgaaaagagcttccgctggcgaccggcacgatcgaagcgccgcgccgtaaccgtcgcgatacgctgctgctgtttgtcatttgtacattgatgtggggcagcaacagcctgtacatcatcaacatgccgctatttattatcaacgaactgcatcttcccgagaaactggccggtgtgatgatggggaccgccgccgggctggaaatcccgacgatgttgattgccggatatttcgccaaacgtctgggtaagcgtttcttaatgcgcgttgctgccgtgggtggcgtctgtttttacgcaggaatgctgatggcgcatagtcctgtcattctgttgggcttgcagctgctaaatgctatttttattggcattctgggcggcatcgggatgctctattttcaggatctgatgcccggtcaggcgggtagtgccaccacgctctataccaacactagccgcgtgggctggatcatcgcaggaagtgtggcgggcatcgtcgccgagatctggaattatcacgctgtgttctggtttgcgatggtgatgattatcgccactctgttttgcttactgcggattaaagatgtttaaggcgcggtcagcatttccagatcgataagccaggtcatggcctgctgacggctgttaccgcacatttcagcgctggcttgtaagcctgcacagactttcggtcgcagtgggctggtgaaaattttacagcgttgctgttcatcaagctgaatgcagggcgtattggcgggcttgccatctggcataccgggaatagggctggaaatactaggggcagtgcaacacgccccgcaacccggacggcattccatacgttgttctcttaaggttaaccaccggattgatgagcgcgcacagtaccaccttttttgcaccagcaaaagtgcgaataccacttgcccgaaaggcccgtcgcgagtactttgtcgcgatatttttgacattttcgactacaggaatttttcgatgccaagagcgaacgaaattaaaaaaggtatggtactgaattacaacggcaaactgctgctggttaaggatattgatattcagagccccactgcccgcggtgccgctacgctgtacaaaatgcgtttttctgatgtccgtaccgggctgaaagtagaagagcgtttcaaaggtgatgatatcgttgacaccgtgacgctgacccgccgttacgttgacttctcctatgtcgatggcaacgaatatgtctttatggataaagaagactataccccgtataccttcaccaaagatcagattgaagaagagttgctgtttatgccagagggcggcatgccggacatgcaggtgctgacctgggacggtcaactgctggcgcttgagctgccgcagaccgttgatctggaaatcgttgaaaccgcaccaggcatcaaaggggcatctgccagcgcccgtaacaaaccggcgacattgagcactggtctggtgattcaggtaccagaatacttaagcccgggcgaaaaaattcgtatccatatcgaagaacgccgttatatggggcgtgctgactaacttcagccgcatgcagaaaagggatagctcaggctgtcccttttttaatttattataccaatcttctattttgcgcttcctgaacaccttacgccctcaattttcactcgttgattgatcgccctcacacttcatcgcattaacaatccagaccaatttcaattgctgtcatataactttacactgtcgttgttaattaatcgttactaagacgtgactcctatgaatacaatcgcctccgttacgctcccgcatcatgtacacgctccacgctatgatcgccagcagttgcaaagtcgtatcgttcattttggctttggagcctttcaccgcgctcatcaggcgttactgaccgatcgtgtgctgaatgcccagggcggcgactgggggatctgtgaaatcagcttgttcagcggtgatcaactgatgagccagctccgcgcacagaaccatttatataccgtgctggagaaaggtgcggacggcaatcaggtgataattgtcggtgccgttcacgaatgccttaatgcaaaactggattccttagcggcaattattgagaaattttgcgagccacaggtggcaattgtttccctgacgattaccgaaaaaggctattgtattgacccggccaccggtgcactcgacaccagtaatccgcggattattcacgatctacaaacccctgaagaacctcactccgcaccgggtattctcgtcgaagcactgaaacgccgccgtgagcgcggccttacaccgtttaccgtgctctcctgcgacaatattcccgacaatggtcatgtggtgaaaaacgcggtgctgggaatggcagaaaaacgtagcccagaactcgccgggtggataaaagagcacgtcagttttccgggaaccatggtcgaccgcattgttccggctgcaaccgacgaaagtctggtggaaatcagccagcatctgggggtgaatgatccctgcgcgattagctgcgaaccgtttatccagtgggtggtggaagataacttcgtcgctgggcgtcctgcctgggaagtcgcaggtgtacaaatggtgaatgatgtcctgccatgggaagagatgaaactgcggatgcttaatggcagccactcttttctcgcttatctgggttacctcagtggattcgcccatatcagtgattgcatgcaggatcgcgcatttcgccatgccgccagaacattaatgctggatgagcaagcgccgacactgcaaattaaagatgtcgatttaacacaatatgcggataagttaattgcacgttttgctaatccggcgctgaaacataagacctggcaaatcgcgatggatggcagccagaaattaccgcaacgcatgctggcaggtattcgcatacatcaggggcgcgaaacggactggagcttgctggcattaggcgttgcaggctggatgcgttacgtcagcggcgttgatgatgccggaaatgccattgatgttcgcgatccgcttagcgataaaattcgcgaacttgttgcgggcagcagcagtgaacaacgcgtaaccgccctgctttccctgcgtgaagttttcggtgatgatctgccagataacccgcattttgtgcaggccatcgaacaagcctggcaacaaatcgtacaattcggcgcacatcaggcgctattaaacaccctcaaaatttaacgatttctgcggttaaagcggatgaagctcaccttcgtccgctctccccttctcttttctgccttttttagccaggattaacgctcagttaacttaccagagtattgcggagccgttgtgaccaggaccaacctcatcaccggttttctcggcagcgggaaaaccacgagcattcttcatctgttagcccataaagatcccaacgaaaaatgggcggtactggttaatgaatttggggaagtcggaattgatggtgctttgctcgccgatagcggcgcattgctgaaagagatccccggcggctgcatgtgctgcgttaatggtttacccatgcaggtagggttgaataccttactgcgtcagggaaaaccagaccgcttgttgatagagccgaccgggctgggccatccgaaacagatcctcgatctgttaaccgcaccagtctatgaaccgtggatagatctgcgcgccaccttgtgcattctcgatccgcgcttgctgctggacgaaaaaagcgccagcaatgaaaacttccgtgaccagctggctgccgcagacatcattgtcgccaataaatccgaccgtacgacgcccgaaagtgagcaagcgctacagcgttggtggcagcaaaatggtggcgatcgacaattaattcacagtgagcatgggaaagttgacggtcatcttctggatttgccgcgtcgcaatttagccgagttgcccgccagcgccgcgcattctcatcagcatgtcgtgaaaaaagggttagcagcgttaagcctgccagagcatcaacgctggcgtcgcagtctgaacagcgggcaaggatatcaggcctgcggctggatattcgacgctgatacggtattcgacaccattggcattctggaatgggcgcgacttgcaccggtggaacgcgtcaaaggcgtgctgcgtattcccgaagggctggtgcgaatcaaccgtcagggcgatgacctgcacattgaaacgcaaaacgttgcgccaccggacagccgtattgagctgatttccagcagcgaagctgactggaatgccttgcagagcgcgctgttgaagcttcgtttagcgactaccgcgtaaggttgcctgcgtttttcagtaagataattagagaaaatatgattaaaaatttgccgcaaatagtgttgttgaatattgtcggcctcgcgctgtttctttcctggtatatccccgttaatcatggattctggttgccgattgatgcggatattttttatttctttaatcagaaactggtcgaaagtaaggcctttttgtggctggttgcattgaccaacaatcgcgccttcgacggttgtagtctgctggcgatgggtatgttgatgctgagtttctggctgaaagaaaacgcccctggcagacgacgtatcgtgattattggtctggtcatgctattaactgcagtggtattaaaccagctgggtcaggcattaattcctgtaaaacgggccagcccaacattgacttttaccgatattaaccgcgtcagcgaactgctctctgttcccacgaaagatgccagtcgagatagctttcccggcgatcacggcatgatgctgcttatttttagcgcattcatgtggcgttatttcggcaaagttgcaggccttatcgcccttattatttttgtggtttttgcatttcccagagtaatgattggcgcacactggtttactgacatcattgtcggtagcatgaccgtgatattgatcggtttgccctgggtgttgctgacgccattaagtgatcgattaatcaccttttttgacaaaagtctaccaggaaaaaacaaacatttccaaaacaaataactcacagtaattaacatcatcagggttatttttatagtgaggataatcctgatgatgcgcaccgtgctttcatctatcgaacgcaaaaatcattctctaagtaaatgaatggattgcatgcgtttcactcaattgtactttaattgaccaaccccgcttattaactttctgtatcactttttcttataaaaaatcatgtaaaaccgctcgccaagaccgcaccaatcgggtaatctcgaactcgttttgcctcggcggtagattatcctcacagcatataattttgtgcgttagtccacagatttggccttaaggaattgtttcaacatgcccaggtaattagtctcgtgtcgcttggcatttttttataacgatatttgtcgttaaggacttcaagggaaaacaaacaacatggtcaaatctcaaccgattttgagatatatcttgcgcgggattcccgcgattgcagtagcggttctgctttctgcatgtagtgcaaataacaccgcaaagaatatgcatcctgagacacgtgcagtgggtagtgaaacaagtagtctgcaagcttctcaggatgaatttgaaaacctggttcgtaatgtcgacgtaaaaagccgaattatggatcagtatgctgactggaaaggcgtacgttatcgtctgggcggcagcactaaaaaaggtatcgattgttctggtttcgtacagcgtacattccgtgagcaatttggcttagaacttccgcgtagcacttacgaacagcaggaaatgggtaaatctgtttcccgcagtaatttgcgtacgggtgatttagttctgttccgtgccggtagtacgggacgccatgtcggtatttatatcggcaacaatcagtttgtccatgcttccaccagcagtggtgttattatttccagcatgaatgaaccgtactggaagaagcgttacaacgaagcacgccgggttctcagccgcagctaataaaccgtttggatgcaatcccttggctatcctgacgagttaactgaaagcactgcttaggcagtgcttttttgttttcattcatcagagaaaatgatgtttccgcgtcttgatccaggctatagtccggtcattgttatcttttaaatgttgtcgtaatttcaggaaattaacggaatcatgttcatacgcgctcccaattttggacgtaagctcctgcttacctgcattgttgcaggcgtaatgattgcgatactggtgagttgccttcagtttttagtggcctggcataagcacgaagtcaaatacgacacactgattaccgacgtacaaaagtatctcgatacctattttgccgacctgaaatccactactgaccggctccagccgctgaccttagatacctgccagcaagctaaccccgaactgaccgcccgcgcagcgtttagcatgaatgtccgaacgtttgtgctggtgaaagataaaaaaacattctgtagttctgcgaccggtgagatggacattccactcaatgaattgattccggcgctcgacattaataaaaacgtcgatatggcgatcttacccggcacgccgatggtgccgaacaaacccgcaatcgtcatctggtatcgcaaccctttgctgaaaaatagcggcgtctttgccgctctgaatctcaacctgacgcctagtctcttttatagtagtcggcaggaagattacgatggcgtcgccctcattattggcaatactgcgctatctaccttttctagtcgtttgatgaacgttaacgaattaaccgacatgccagtccgtgaaactaaaattgcgggcattcctctgaccgttcggctttatgcagatgactggacatggaacgatgtgtggtacgcatttttactgggcggcatgagtggaactgtcgttggcctgctctgctattacctgatgagcgtacgtatgcgccccggcagagaaatcatgaccgccatcaagcgcgaacaattttacgtggcgtatcaaccggtggtggatacacaagctttgcgagtaacgggcctggaagtactgctacgctggcggcatcctgtcgcgggagaaattcccccggatgccttcattaactttgccgaaagccaaaagatgattgtgccgctgactcagcacctgtttgagttaattgcccgcgatgccgcagaattagaaaaagtgctgccggtaggcgtcaaatttggtattaacattgcgccggaccatctgcacagcgaaagctttaaagcagatatccagaaactgctcacttccctgcccgcacaccatttccagattgtgctggaaattaccgagcgcgatatgttgaaagagcaagaagccacacaactcttcgcctggctgcacagcgtcggcgtagaaattgctattgatgacttcggcaccgggcacagcgcgcttatctatcttgagcgttttacgctcgattatctgaaaattgaccgtggatttatcaacgccatcggtacggaaacgatcacttcccccgtacttgacgcggtgctgacgctggcgaaacgcctcaatatgctgacggttgctgaaggggtcgaaacgccggaacaggcgcgatggctaagcgaacgcggcgttaatttcatgcaaggctactggattagccgcccgttaccgctggacgattttgttcgctggctaaagaaaccgtatacgccgcagtggtaaggtgtgcttacgtcccttattattcatagtgaaagcatgccggattgcggctaatgatgagtaaaaggaaatccgttgcagatgattgtgcgcatactgctgctgtttatcgctctgttcacctttggtgtgcaggcgcaggctatcaaggaaagctatgcctttgccgtgctgggcgaaccccggtacgcgtttaatttcaaccattttgattatgtgaaccccgccgcgccaaaaggtgggcagataacgttgagtgccctcggcaccttcgataatttcaaccgctatgcactgcgcggcaacccgggcgcacgcaccgagcagctgtacgacacgctatttacgacttccgatgacgaaccaggcagttattacccgctgattgctgaaagcgcacgctatgctgacgattattcctgggtggaggtcgctattaatccgcgcgcccgttttcatgatggtagccccattactgcccgcgatgtagagtttacttttcaaaaatttatgaccgaaggcgtgccgcaatttcgtctggtctacaaaggcaccaccgtcaaagccattgcaccgttaaccgtgcgcattgagttagctaaacccggtaaagaagatatgctgagtctgtttagcctgccggtatttccagaaaagtactggaaggatcacaaacttagcgacccgctcgccacgcctccgcttgccagtggtccgtaccgcgttacgtcctggaaaatggggcaaaatattgtctattcccgtgtgaaagattactgggcagcaaacttaccggtaaaccgtggacgctggaatttcgacaccattcgctacgattattacctcgatgataatgtcgcctttgaagcgtttaaagcaggtgcctttgatttgcgtatggaaaacgacgccaaaaactgggccacgcgttataccggtaaaaatttcgataaaaaatacatcatcaaagatgagcaaaagaacgaaagtgcccaggatacgcgttggctggcgtttaatatccaacgtccggtattcagcgatcgccgggtccgggaagctatcactctcgcctttgactttgaatggatgaacaaggcgttgttttacaatgcctggagtcgcacgaacagttattttcagaataccgaatacgcggccagaaattaccccgacgccgcggagctggtgcttctggcaccaatgaaaaaagatctaccgagtgaagtcttcacacaaatctaccagccgccggtatccaaaggcgatggctacgatcgtgacaacctgttaaaagccgacaaacttctcaacgaagcgggctgggtgctgaagggtcagcaacgcgttaatgccacaacgggtcagccactcagctttgaattattgcttcccgcaagcagcaatagtcagtgggtattgccgttccagcacagcctgcaacggctgggtatcaacatggacattcgcaaggtggataacagccaaatcactaaccgcatgcgcagtcgcgactatgacatgatgccgcgcgtatggcgggcgatgccgtggcccagttccgatttacagatttcctggagtagcgaatatatcaattccacttataatgcccccggcgtgcaaagcccggttatcgacagcctgatcaaccaaattattgccgcgcagggaaataaagaaaaattactgccgttggggcgagcactggatcgcgtattaacgtggaattattacatgctgccaatgtggtacatggcggaagaccgtctcgcctggtgggataaattctcccagccggccgtgcgccccatctatagcctcggtatcgatacctggtggtatgacgtcaataaagcggccaaactgccgtccgccagcaaacagggagagtaaatgggcgcttacctgattcgccgtctgttgctggtgatcccaacattatgggcgattatcaccatcaactttttcatcgtgcaaattgcgcctggcggtccggtcgaccaggccatcgccgccattgagtttggtaatgccggagtattacccggcgcaggcggtgaaggtgttcgtgccagccatgcgcaaacgggtgtcggcaatatcagcgacagtaattaccgtggcggacgcggattagatccagaagtgatcgctgagatcactcatcgctacggttttgataagccgatccacgaacgttacttcaaaatgctctgggactacatccgctttgattttggcgatagcctgtttcgcagcgccagcgtgctgacgctgattaaagacagtctgccggtttccatcaccctcggattgtggagcacgctgattatctatctggtgagcattccgttaggcattcgcaaagctgtttataatgggagccgctttgacgtctggagtagcgcatttatcatcatcggctacgccattccggcctttttgtttgccatcctgctgattgtcttcttcgcgggcggcagctatttcgacctgttccctctacgcggcctggtttccgctaactttgatagcctgccgtggtatcagaaaatcaccgattatctgtggcatatcacgctgccggtgctggcgacagtgattggtggctttgcggcgctgaccatgctgacaaaaaacagtttccttgatgaagtgcgcaagcaatacgtggtgaccgcgcgtgcgaaaggggtaagtgaaaaaaatattctctggaaacatgtgttccgcaacgccatgctgctggtgattgccggttttccggcgacgtttatcagcatgttttttaccggcagcctgctgattgaggtgatgtttagtctcaatggtctgggcttactgggctacgaagcgaccgtcagccgcgattatcctgtaatgtttggtaccttgtatattttcaccctgattggcctgctgctgaatattgtcagtgatatcagctatacgctggttgatccgcgtattgattttgagggacgttaatgagccgactcagccccgtcaatcaggcccgttgggcgcgttttcgtcataaccgtcgcggctactggagcttatggattttcctcgtcttgtttggtttgagtttgtgttctgaacttatcgccaacgataaaccgttgctggtgcgttatgacggcagttggtatttcccgttattgaaaaactacagcgaaagcgattttggcggcccgctggcaagtcaggctgattatcaggacccgtggctgaaacaacggctggaaaataacggctgggtactgtgggcaccgattcgctttggtgctaccagtatcaactttgctaccaataagcccttcccttctccaccctcccggcaaaactggctgggaacggatgccaacggcggcgatgtgctggcacgcattctctatggcacgcggatcagcgttctgtttggcctgatgctgactctctgttccagcgtgatgggcgtgctggcgggggcgctacaaggctattacggcggtaaagtcgatctctggggacaacgctttattgaagtatggagcgggatgccgacgctgtttttgattattttactttccagcgtcgtacagcctaacttctggtggctgctggcaattactgtcttgtttggctggatgagtctggtcggcgtggtgcgggcggagtttttacgtactcgtaatttcgactacattcgtgcggcacaggcgcttggcgtcagcgatcgcagtatcatcctgcgtcatatgttgcctaatgccatggtcgcgaccctcacctttttaccgtttattttatgtagtagcataaccaccctgaccagcctcgatttcctcggcttcggtctaccgctcggtagtccgagtctcggtgaactgctgttacaagggaaaaataaccttcaggccccgtggcttgggatcaccgccttcttgagcgtggcgatattattgtctttgctgatctttattggtgaagccgtccgcgacgcatttgatcctaataaggcggtgtaacatgacgcaaactctgttagcgattgaaaatttgagcgtgggttttcgccatcagcaaaccgtacgtacagtagtcaatgatgttagtctacagattgaggctggcgaaacgctggcgctggtgggtgagagtggtagtggcaaaagcgttaccgcgctgagtattttacgcctgctcccttccccgccggttgaatatctctccggcgatattcgttttcatggcgaaagcctgcttcacgccagcgatcaaacgttgcgcggtgtacgcggtaataagatcgccatgatttttcaggaaccgatggtgagcttaaatccattgcataccctggaaaaacagctttatgaagtgcttagtctccaccgcgggatgcgtcgggaagcggctcgtggcgaaattcttaactgccttgatcgcgttggtatccgccaggcggcaaaacggctgacagattatccgcatcagctctccggcggcgaacggcagcgggtgatgattgcgatggcgctgttaacgcgaccggaattattaattgccgatgaaccgaccaccgcactggacgtctctgtccaggcgcagattttacagctgttgcgcgaactgcaaggcgagctgaatatgggcatgctgtttattactcataacctcagcattgtcagaaaactggcccaccgcgtggcggtaatgcaaaacggtcgctgtgtcgagcaaaattacgccgctacgctatttgcaagtcccactcatccttacacacaaaagctactcaacagtgaaccgagtggcgatccagtgccgttgccagaacctgccagtacgttgctggatgttgaacagcttcaggttgccttccccattcgcaaagggattttgaagcgcattgtggatcataatgtggtggtgaaaaacatcagttttacgctacgagcgggtgaaacactgggtttagtgggcgagtccggttccgggaaaagtacgacgggactggcgctgctgcgactgattaattctcagggcagcatcatctttgacggtcagccactgcaaaatttaaatcgccgccagctgttacctattcgtcatcgcattcaggtggtatttcaggatccaaactccagcctcaacccacgactcaacgttttgcagattattgaggaaggcttacgggttcaccagccgacgctttctgccgcacaacgcgaacaacaagtgatagccgtgatgcatgaagtgggattagatcctgaaacacgccaccgttatccggcggagttctctggtggtcagcgacaacgtattgcgattgccagggcattaattcttaagcccagcctgatcatacttgatgaaccgacaagtagtctcgacaaaacggtacaggcgcaaatattgacgctattgaaaagtttgcaacaaaagcatcaactggcctatttgtttatcagccacgatttgcacgttgtccgcgcgttatgtcatcaggttatcatactgcgacaaggggaagtagtggaacaaggaccgtgcgcgcgcgtgtttgccacaccgcagcaggagtatacgcgtcagctactggcgttgagctgacgcttaaaaaggattgtagttactaaagggttcggcaattgccacaccaaaatttttcaatcggcatgttgcagcaaactcgtcctggcgatttacaaacaggcacggctcaccttcacactccagcacgctacatggaacttcgatgtcgcttaacgcctggcttagtttatacatcacgctccatgcattatcaccatccgggctaagcaatttaagcgccaccaggctgttgtcaccgcacggtccattttgcggaatcggttcaaccttgctacctgcgaaaccagcagaccagcgatagttctgcggcagtcgatggacgatactgagttgtaaactagtcacttattttccccggaagcacattcacttcacaatttgtttacatcaattttaacacatcatcaacaatccgtctttatacagatcgtaaagattgatgcctcgcctgcgtggcctctatggctctgatttaagtaatatctgcgggcgtggtcacgtttgcggggctatatgtacccgtttctgcgatctaactcaacctttttaactacaatgatgtgactttttacataaattgattttacataaaataaacatatatcgggggaatgatagatttgtggttgacatgcatcaacaaaggaagccttttagcttcctcgttgtgcaatagatcaccgttttttcggccgactggcgtacagacagaagagaatggagctggttgcgcagaatgcaatactccaaatcatcggccatgcagagttaaaggtcgcaagagaaagcaatgcgccaacaattgcccctatgccaaaacggaaggttcctgccaggctagatgccgttcccgccatatggggaaactcatcaagaatgaccgccatcgcattggaactcaccatgctcacgcagcccacaaacgccgcaacgccaaccaccaggctccaaaatcccagccccagcagcgcactgatgaccatccacgctgccataataaattgtatccacaacccgctgcggaacatatttaacgcgccaatgcggcggacgaagcggctgttaaagatggtcatcacgaacagaaaaacaatgtttagcgcaaagtaataaccaaagttttccggcgcgacgtggttaatttcaatataaacaaacggtccggcgcttaagaaactgaacatcccggcaaagctgaaaccactggcaagcatgtagctcaggacacgtttatggcggaacagcgccgcaaagttaccaatagtggtacgaatgtgaaatggctgacgacgctccggtggtaaggtttctttaatcaggaagaaaatcattgcgctagccagaatcgccgctaatgccaggatccagaagatgtaatgccagctcagccacaccagcacccagccgccaactatcggtgccatcagcggtgcaatggttgtcaccagcatgacaaagctcatcatccggctgaactcttctttcgggtaaatatcgcgcatcagggcgttaatgaccacgctggccgcagccgcagccagcccgtggaagaaacgcatcacaatcagctgatcgatggtgtttgccaacgcacacgccaccgcggcggcggcaaacaccagcgtaccgccgagcaccaccggcttacgcccgaagctgtctgccatcggcccgtagattaactgccccaacgcaaagcccagaatataagtactgagggtcatctgcgtactgcccgccggtacgccaaactgcgcactaattaccggtagcgcgggcagatacatatcaatgctcagcggcatcaacatggccagcaggccaaggataaaaacaatagcaaagctgctatgctgtcgggtggtcacaacgggctcctgaaagtcattgaaaagttagacgacgctggcaatttcttcttcagttaacggacgatattcaccgggggctaaatcagcatccagcgtaataccgccaatacgttcacgatgcagctcaaccacgtggttacccacggcggcgaacatgcgtttcacctgatgataacgcccttcgctgatggtcagacgaacctgcgttggggtaatcacttccagcaccgcaggcttagtgagatctttttcgttatgcagctgcacgcctttagcaaattgctctgccgtatcgtcagctacaggactttccagtgtcaccagataggtcttctcgcaatgatggcgcggagaagtaatgcggtggctccactgaccatcatcagtcatcagcaccagaccggtggtatcaatatccaaccgccccgccgcatgcagtttccacgctaccggttcatcaagaaaatagagcaccgttgggtgatcagggtcgtccgtggagcaaacatagccctgaggcttattgagcatgaagtaacgtggaccgtgttgctgcgccagcgggttgccatcgtaagcgacatcatgttcaggaagcagtttgaacgctgcattacggacgatttcgccatcgacggtgacacgattgccgcggatttcacgcccggcaatagcacggctaacgccgagttgctgtgcgataaatttatcaagtcgcatgtgtgtgattttgcctgtaaaaacggaggtcgggcattgacccgaaaatctgaactgttgtctgcccagtatagcggtctaataacatccctcaagggaaaaagatccatggcatactattagcagaataatctacctacgcgagaccatgatttttacacttcgcccatatcagcaagaagccgtggatgccacgctcaaccattttcgtcgtcataaaacccctgccgttatcgtgctgcccaccggcgcaggtaaaagcctggtgatagcggaactggcacggctggctcgtggtcgcgtgctggtgctggcacacgttaaagaactggtggcgcaaaaccatgcaaagtatcaggcgctggggctggaagccgatatttttgccgccgggctaaagcgcaaagagagccacggtaaagtggtatttggcagcgtgcagtctgtcgcccgtaatcttgatgcctttcagggtgaatttagcctgttgattgtcgatgaatgtcaccgtattggtgacgatgaagagagccagtatcagcaaatcctcactcacctgacaaaagtgaatccccacttacgcctgctggggctgactgccacgccttttcgattgggcaaaggctggatctaccagtttcattatcacggcatggtacgcggcgatgagaaagcccttttccgtgactgcatttatgagctgccgctgcgttatatgattaaacacggctatctgacgccgccagaacgactggatatgccagtagtgcaatacgatttcagccgcttgcaggcacagagtaacgggctgttcagcgaagccgatctcaaccgtgagctgaaaaaacaacaacgtattaccccgcacatcatcagccagattatggagtttgctgcaacgcgcaaaggggtgatgatttttgccgcgacggttgaacacgcaaaagagattgtgggattactgcctgccgaagatgcagcactgattactggcgacacccccggcgctgagcgcgatgtgttaattgaaaattttaaagcccagcgttttcgctatctggtcaacgtcgcggtactgaccaccggatttgacgccccgcacgtcgatcttatcgccattctgcgccctaccgaaagtgtgagtctttaccaacaaattgtcgggcgcggtctgcgtctcgctccgggcaagactgattgcttaattcttgattatgcgggtaatcctcacgatctctacgcgccggaagttggtacaccaaaaggcaaaagtgacaacgttccggtacaggttttctgccctgcctgcggttttgccaacaccttttgggggaaaacgaccgccgacgggacattgattgaacactttggtcgtcgctgtcagggatggtttgaagatgacgacggtcatcgcgaacaatgtgacttccgtttccgttttaaaaattgcccgcaatgtaacgcggaaaacgatattgccgcccgccgctgccgcgaatgtgacaccgtactggttgatccggacgatatgttaaaagcggcgctacgactgaaagacgcgctggtattacgctgtagcggcatgtctttgcaacatgggcacgacgagaaaggcgaatggttgaaaatcacctattacgatgaagacggcgcggatgtgagtgagcgtttccgtctgcaaacacctgcccagcgtaccgccttcgagcagctttttatccgcccgcatacgcgcacaccgggcatcccgctgcgctggatcaccgccgccgatatcctcgcccagcaagccttattgcgacacccggattttgtcgtcgcccgcatgaaaggccagtactggcaggtgcgtgaaaaagtgttcgattacgaaggtcgttttcgtctggcgcacgaattacgcggttaatggtagttttgattgatgtataaggcgattgagtatagaatctcgcccgcttttgcatacgcaaagcagatcacttacctgttgctgggtcgcctgtagcaggattaatttaagagagaaagaaatgtttactatcaacgcagaagtacgtaaagagcagggtaagggtgcgagccgccgcctgcgtgccgctaacaagttcccggcaatcatctacggtggcaaagaagcgccgctggctatcgagctggatcacgacaaagtcatgaacatgcaagctaaagctgaattctacagcgaagttctgaccatcgttgttgacggtaaagaaatcaaagttaaagctcaggacgtacagcgtcacccgtacaaaccgaagctgcagcacatcgacttcgttcgcgcttaattgctgaataagttgtaaaaaaccccgctccggcggggttttttgtatctgcagattatgcctgattacggtattgctattttttgcaggccagataaggcgttcacgccgcatctggcattcagaacacaaaaccgattaattgccgccagacgtccggcgctgcaattggtcgcgcaaattcggcggcgtgcctttaatggtcaaggtatcggttgctggatcccagaagatgcgttcacctaacagcatcgcatcaaagttaatagtcaagccaccgccgctaccggcaaacttcgtcaactgacgcagtgtgctacggtctgccgggaagctctcttccagttcgtagcctttttcagccgcaaactccgtgaagctcacttcgcttacgcctgccagctctttgctcaggcttttcagttcgatctcttcgcctgcctgcagctgctcattacagtagctataaacctgctggcgcacgttctgtcgctctgctttatccagttgtgcttcggcagtgaaatcatcaaccgcttgcaacagcccacggttttgcgctttcgcgtttaacccttcgctggccccgaggaaatccataaagaaatccgccactttgcgccctactcgccctttcaggaaagtgagatagcgggtggactctggattggtttcccattcggttaaatcgatacgcgcaacaatatccgcatgattgatatcaagataatgggttgggttgatgtcgagattttcgttaacgcgcatactgctcaggttgctcagaactgccaccagcaaatactccaccgccagatagcgatagtggcaaaacagcacgaatccaccgtcagcaaaaggatatttcgctaattcgtcacgcaggcggccggttgccgcgcggctaaatgccaggaagtcctcttcgccctgacgctgtaagcgcagcgtctgcgccagttcactctcttcgctaaacaagccgtaagctttatttttggcgctatagacccgatgcagttctgccaccatctcaacgacggtttctgtcggttccagcaaactatcgcgcaacaccagctcaaggttctgctcatcacgcttgataagctggtgcagagcaatctggttgatatccagactcatgataaactctcctttaagaccgggcggtattcaaccaccgccggttaagcgacgcaataaaagatggcggtcattttacagaaggcagcgtaacgagaatgatttaacgcataaaaaagcagaaaaaaaaccgttgctacggtaatatgttgccctttcatcaactaactgatttcgatttatgccacaaatttcccgctacagtgatgaacaggttgaacaattgctcgcagagctgctcaacgtactggaaaaacataaggctccgaccgacctttccctgatggtgttaggcaacatggtcactaaccttatcaacaccagcattgccccggcccaacgccaggcaattgccaactcttttgcccgcgccttacagtcctctatcaacgaagacaaagcgcactaagggaaacagataacaggttatggtaactcatcgtcagcgctaccgtgaaaaagtctcccagatggtcagttgggggcactggtttgcactgttcaatattctgcttagcctcgtcattggcagccgttacctgtttatcgccgactggccgacaacgcttgctggtcgcatttattcctacgtaagcattatcggccatttcagcttcctggtgttcgccacctacttgctgatcctcttcccgctgacctttatcgtcggctcccagaggctgatgaggtttttgtccgtcattctggcaacggcgggaatgacgctattactgatcgatagcgaagtctttactcgtttccatctccatcttaatcccatcgtctggcaactggttatcaacccagacgaaaatgagatggcgcgcgactggcagctgatgttcatcagcgtgccggttattttattgcttgaactggtgtttgcgacgtggagctggcaaaagctgcgcagcctgacgcgtcgtcgacgcttcgcgcgcccgctggccgcattcttatttatcgcctttatcgccagccatgtggtgtatatctgggccgatgccaacttctatcgcccgatcaccatgcagcgcgctaacctgccgcttagctacccgatgacggcgcgacgttttcttgagaagcatggtctgcttgatgcgcaggagtatcaacgccgtcttattgagcaaggtaatccagacgccgtttccgttcagtatccgttaagcgaactgcgctatcgcgatatgggcaccgggcagaatgtgctgttgattactgtcgatggcctgaactacagtcgcttcgagaagcagatgcctgcgctggcaggttttgctgagcaaaatattagcttcacgcgccatatgagctccggcaacactacagacaacggcatctttggcctgttctatggcatcagcccgagctatatggacggcattctgagcacccgtacgcctgcggcattaattactgcgcttaatcagcaaggctatcagctggggttattcagtagtgatggctttaccagcccgctgtatcgccaggcattgttgagtgatttcagcatgccgagcgtacgcacccaatccgacgagcagaccgccacgcagtggatcaactggctgggacgctacgcacaagaagataaccgctggttcagctgggtttctttcaatggtactaacattgacgacagcaatcagcaggcatttgcacggaaatatagccgggcggcaggcaatgtcgatgaccagatcaaccgcgtgctcaatgcactgcgtgattctggcaaactggacaatacggtggtgattatcactgccggtcggggtattccactgagcgaagaggaagaaacctttgactggtcccacggtcatctgcaggtgccattagtgattcactggccaggcacgccggcgcagcgtattaatgctctgactgatcataccgatctgatgacgacgctgatgcaacgcctgctacatgtcagcacacctgccagcgaatatagccaaggtcaggatttgttcaaccctcaacgccgtcattactgggttaccgcagcggataacgatacgctggcaattaccaccccgaaaaagacgctggtactgaacaataacggtaaataccgcacttacaacttacgtggtgaaagagtgaaagatgaaaaaccacagttaagtttgttattgcaagtgctgacagacgagaagcgttttatcgctaactgattaattataaatcagttagcgaaatatcttacttgcaatcggtgtggaaaacggtagtattagcagccacgagtcggcacgtagcgcagcctggtagcgcaccgtcatggggtgtcgggggtcggaggttcaaatcctctcgtgccgaccaaaaatcccaagaaaaaaccaacccttacggttggtttttttatatctgcaattaattcgataaacagaccgtgacacatcacagcctgtttattttctgttatcagaacgtcctgagctttcatcctatgaaattaattgctgttaaaagcattgggtacagaaaatacccatagctccatacccggagtcagtttttaaaaactgtttaaagaaatgcacaagtattgtgattgattttttagttgtttttcttgatgagaagctgatgcaaaattccgtctttataatgaaaatgatgccaaagcgaacgacaaggttgtagttttcactacatgtccatacataaaatggggtaacattcacgcgcctggtagcgttaccaacgctacgctcaaacataatgattctaataaaacctcaggagactactatgcctgaagcaacaccttttcaggtgatgattgtggatgatcatccacttatgcgacgcggtgttcgtcagttactggagcttgatcctggctctgaagtggtcgccgaagcgggcgacggcgcgagcgctatcgatctggcgaatagactggatatcgacgtgatcttgctggatctcaatatgaaaggtatgagtggcctggatactctcaatgccttgcgcagggatggcgttaccgcgcaaattattatcctgaccgtatccgatgcctccagcgatgtctttgcgctgatagacgcaggcgcagacggttatctgttgaaagacagcgacccggaagtattgctggaagcgattcgtgccggagcgaaaggcagcaaagtctttagcgaacgcgtcaatcagtacttacgtgaacgtgaaatgtttggcgcggaagaagatcccttcagcgtgctgacggagcgcgagctggatgttctgcacgagctggcacaggggctgagtaataaacagattgccagcgtgttgaatatttccgagcagacagtaaaagtacatattcgcaatctgctgcgtaaactcaatgtccgcagtcgcgtggcggccaccattctgttcctgcaacaacgcggggcacaataaaaatagcccgatagatttatcatcgggctgagatttatgacaaacgcaaaactgcctgatgcgctacgcttatcaggcctacgtggatcgatcaatttattgaatttacacaattttgtaggccggataaggcgttcacgccgcatccggcataaactaagcgcactttgtcaacagtctagcccgatggcatcaccatcgggcctctttttatttactctcctgcgggctcaaatgttgcatcgcctgcgcgatactacgttcaatcaccgcacggcgagtatcgttggcaggtaagagtttcaacatcatctcccacgcggcaacggcttcgccaaatcgctgctgctcaaaggcattaaacgcatacatgcttagcacacggatattgctatggtccgttctcaccagctgacgtagcagttcaccgccgaggcggttgtcgttgggatcagaactacgagtcaacgcttcagcgtatcccagtgcagcatcactgtttttcggatcgaggcgatacgcagtggcgtatgcatcggtggcgatactggcgttacccagcgccatgccaacgcggcccaacataatccagccttctatatctcccggatttttttgcagttgagtacgcatccccagcgcaagacggctcatctcttcttcgttgagcggatcggctttcggatccagcgccctgtccagcaacgccggagcctgtgccgtggcctgctgccagattttcacctgctgataattgccagtctggtagtagctgacgccagccacaattaacgccaccacaatacccggcagataaacaacatatccggcacgcttaccttccggcacgctttgttcaggaaacgcttccggcaccacgcgtacccgacgccggctgcgggcgtatatgacccaaccgccaatgccaatagccactactggcagcacccacagcagcacggtcagcggcgttaacggcggatcgtaagtgacgaagttgccgtaacgcgccaccatataatcgacaatctcttttttacttttaccttcctgcatcagttcatacactttctgacgcaggtcggtggcaatcatgctgttggaatcggcaatgctgttgttctggcatttcgggcagcgcagttcttcagtgagctgacggaactgttgttcctgtgcttcatctttaaactgcaacacatcgatggtcgccagcgcactgccggagatcatcagcatcagcacgcccaataaaaacctcattgtgcggcctccttactgtatttctcccacagcggcttgatctcttcttcccagacgcgaggattcagatcgcccgcatggcgatagcgaatgatgccgttgccgtcaataagaaacgtttctggcgcgccatagacaccgagatccagccctaacatgccatcgccatcaaacaggcttagcgcgtaaggattgcccagctctttcagccagctgattgccttctggcgatcgtctttatagttcatgccgaccacgcggatgccctgcgcagaaagctgattcagatattgatgttccgcacggcaggtcggacaccaggtcgcccagacgttaagcagtactggtttgccctgagtcagcacatccgcctgataaaactgccccggattgtccagactttcgagacgaaacttcggcacaggcttgccaatgagcgcgctttccagattggtcggatcatccccttcggcattacgcgccagctgccacagcagcgccgcggcaatcgccaggaagataatcaacggaattaacaatactttgcgcttcatacggcctccggcgcagttttttgcggactcacgcgcttacgatagcgaggatcaaacagacacagcagtccgcccaacgccatcatcagcccgcccgcccaaatccagcgaacaaatggtttgtagtaaagacgcacggcccacgcgccgttttccagctcttcaccgagggccgcgtacaggtcacgcgtgatgccgccgtcaattgccgcttcggtcatcatgctcccggcagtgttgtaataacgtttttccgcatacagcaccgtttccggcttgccatcgcgcgttacgccgatagtcgccacaccgccacgccagttcgggccagtcacctctttgacatcacggaaggtgaagcgatattcatgaatatcgacgctatcgccggacttcatgcgcacatcacgctcaacgctatagttctggctaaaggcaatgccaacaattgtcactgccagcccaaggtgagccgccaccatcccccaataactgaaggtggttttcgtgccgcgactaatacgtagcgcagcttccgcaattgccagcaccgcaatccagcaggccattgccaggccgagcaccgtcatcgccacaactttgctttcgaacagccacggcaacagcaggctcagcaccagcgtagagatgaaggcgataatcaataaattgcggatcttacgcgggcgatcccgcccccagcgcaccagaggaccgacaccaagcagtagcgcaaacggcaccatcagccaggtaaacatggtgttgaagaacggttcgccaatgctaatactgcccagtcccagttgcttatgcaccaacggcagcagcgtccccagcaacaccaccagcatcgcagcgaccagcaaaacattgttcgctaacagcaaagattcccggctccacagcgcattgtttacgcgactgcgaactttgtgtccacgcgcggcaaacagcagcaggctaccgccaatcaccagcaccataaaggcgaggataaacataccgcgcgccggatcagacgcaaacgcgtgtacgcttaccagcacgccggaacgcacgaggaaagtccccaacagacacaagctgaaggcactgattgccagcagtaatgtccacgctttgaagctggcgcgttgttcagtgaccgccagactgtgcatcagcgcagtccccaccagccacggcataaagctggcgttttctaccggatcccagaaccaccagccaccccagccgagttcgtaataggcccatgcggaaccgagcacgatgccgagcgtcaggaagatccacgctgccagcgtccacggacgagtaaaacgcgcataagtgctgtccagacgcccgctcagcaaagaagcaatggcaaaagcaaacgccacgctgaaacccacgtaccccatataaagcagaggcggatggaagatcagccccggatcctgcaatagcgggttaagatcgcgaccttcaatcgggaagttcggcaacgtgcgagagaacgggttagaggtaaagagaatgaacagcaaaaagccgacactgaccatccccattatcgccagtacacgggccacaatatccagcggaatacgctgactaaaaatcgccaccgcaaaggtccagccgctcatcagcagcacccacagcagtaggctgccttcatgcgcgccccaggtagccgccacgcgataccacaccggaagctgggtattggagttgctggcaacataggtgacggtgaagtcgttgaccacgaaagcattgaccagcaccagaaatgcgccagccacagacataaacagcagccaggcaaacaagcgggaagacgccatcatgcgcgcatctccgcgcgccacgccccatagcggatacacggacagcagcagcgcaattcccagcgccaggcacagcagtccgttaccaatttctggcatcatgatgctgggtccttataaacttacgtcaacttgctgggtccttataaacactcgccgggcgacggtggttagcttccatcgctttctcaacttctggcggcgtatagttttcatcgtgtttcgccagcacttctttcgcgaggatatgattgcctttttccagttcgccctgcaccacaacgccctgcccttcacggaacagatccggcaaaatgccttcgtaagagacatccacactgccttcagcatcgtaaatggtgaaggtcactttcaggctattgggatcgcgctgcacactacccggcatcaccatcccgccaacgcgcagacgctgaccgacttccggcatttgctgagtttcacgcttgccgtagagaatttcccccggcgtataaaagagatcgatattgctgcgcagcgcatatagcaccagaccgatagtcagcgccagccctgccaacacggcacaggcaatccacaagcggtttttacggcgaatattcatgcagcctcctgctgttgcgcagcacgtaaacgcgcctcacgcgcccgctgttgcgccacgccacgcagaattgcgcgatgttgcatcacgctgtgcacgaccaaaaccaccagcggaataacggtcatcaccaccgccagccagacaaaaaaggcgtaaccgcccattgcgaaaaattcattccaggaagcaaatgcaggggtcatttacggcctcttttcagtatcagttcactcacccacggacggcgtttttccatcagcaaaatcaaattacgcatccgcatcagcgtcagcgtggcagacaggagcaggaagccaaaaatgctccagcgcagcgggctacgcatcgccggatcgatactttgctgcatccgcgtacttccctgatgcagggtgttccaccactccacggagtaatgaataatcggcagattcaccacgccaatcagcaccaggatacctgccgcacggcccgccagacggcggtcgtcgaaggcgtgccacagggcaatcacacccacatacaaaaacagcagcaccagttcagaagtcagacgtgcatcccatacccaccaggtgccccacatcggttttccccatgcagagccggtaaccagggcaataaaggtaaacacggcaccaatgggggccatcgccgccaccgccaggttggccattttcatctgccagacaaggccaataaacgctgccactgccatacttgcataaatgcccatgctccagatcgccgcaggcacatgcaggtagataatgcggtagctatttccctgctgataatcagccggagcaaagccgaatccccagatccagccgacggtaagcacgaccacactggcaattgccagccacggtataaaccagccacagatttgatacagccgtggtgggatcgccagttgatgcagtgttttccacatagtttcgataccagactcgaacaaaaatcagtaatccagcgttattgaatgctgattcgtaacgctgccgccgtcgcaaaaggacttaatgtcgcggtgcctgccagcaacgcgcctaaaattgccagatacccgtcaacgggcaaatgcatagaagccgcgtccatcgcggcggtggcaaagatgagtaatgggatagtcagcggtaacaccagtatgctgagcagcacaccaccgcgcttaagtcccactgtcagcgccacgcccggtgcaccgagaaagccaagcgtaggcgttcccagcagcagcgtcagcgccatcacttgccagccataaacatccattcccagtagcattgctaccagtgggctaaggatgagtaacggcagaccggttaccatccagtgcgccatcaccttcgccagcacaacggcgggcaagggtaacggcaacaacatcaattgttcaagactgccgtcctgcaaatcgtcacggaacagtcgttccagcgccagcaaggaactaagcagcgcagcaacccagataatgcccggtgcaatacgcgccagcagttgcggctccggaccgatactgagcggaaaaagggtaattacaatcaggaagaaccacagcgggttggcgatttcggcgctatggcgaaacgctacacgcagctcaagacggaaaatgcgccagaacatcatgcggccctcgtttgcgtcagactaatgcggcgaattttactttcagcaacgttgagcggctggtgggtagtcagaatcacaatccccccctgctccgtatgctgcgccatacgctgggtcagacgatcgacaccgttaacgtcaatcgcggtaaaaggctcgtcgaggatccataacgtggcacgggtcagccacagacgcgctaaagcgacgcggcgttgttgcccggcgctgagctgatttacaggaatatcttcgaatccggcaagcccggcctgcgccagggcttccagacattgtgcggtatcgccatcgcgatgataaaagtgcagattttctaacgccgtcagccgggttttgatccccggctgatggcctatccataacaggttttgatggtagctgtcgcgtacctgatgcaagggctgcccttgccagagaacctcgcctgcgtcagggcgagacaaccccgtcagcaaacggagaagcgttgtcttccccgcgccgttgctaccggtgatttgtacccactctcctgcgttcagcgtaaaactcaagccactaaataaggttcgttcatcccgctcacaaagtaactctctggcttcaagcatacccacgcaataaccctgttaaaaacctggctcgacttcacgcatatcgggcagcttgtgcgctatccctttatggcaatcaatacaggtttgcccatctttcaccgcctggtcatgcatcttcgcggcaacgcttttctgggcggttgtatccatatactcgaagttgtgacagttacggcactcctggctgttattgtccttcatgcgccgccactcattctgtgccatcgtcagacgatgagcttcaaatttctgcggcgtgtcaataacgccaaaaattttaccatacagctctttacttgctttgagcttgcgtatcatcttcggcacaaactcgtgcggaacgtgacaatccggacaggtcgcacggacgccgctacggttgttgtagtgcacggaatccatgtattcctgatacaccgtgttgcgcatttcgtggcagctaatgcagaactcttcggtattggctttttccatcccggtgttaaagccaccccagaagacgatgccgccaacaaaaccgatcaacagcagcgtccccagcgccagacggctgggggtacgccaccatttccacaggcgcttaatcagaccaggcttacggtcagaatttcccataataacctcttatttcccgtaacctttacttggggtaaaggtattccccacgattggcgcggtatcggcctgcggtacgtgacattgcagacagaaataacgacgcggagccacttccgcgcccactttgccgtcgctgtccataaagtgagtaggactgatacgcggcgcgccagtggtgcgatagctttcgacaccgtggcactgcaagcagcgattggtattggtcgttacctgataaccttcaacgctatgcgggatcattggcggctgattcacatagttcagcggcatccgatcctgctcttttggcatccgaatggccccttcctgtgtcccggatacttccgggctctggctaaaatcgacgccattagccgcccaaaccgcgccgcttaccaccagggccagcatcgccgtccattgacacagcgctttcttcaggtcatggcttttcatgatttcgctcccgaactccattatgtcaacttttcgctccgctactccatcgtgtagttattgtaaatacatcctcagaacagacatccacgcagcgaccgcacgtcatgcaatcgcggctggtgacctgcaccgggctttgttcatccagcaccggggcacgtagcacatgcggttccgggcaaacatgaaaacaatccatacagcggttacatttctgccgatcggtggccgcaacggtaatcacacctttgctacccagcacgccatacagcgcgccaaccggacaaatgtgcccgcaccagccgtgttcaacgaccagtagatcaaataaaaacagcgcgagaataagcagcgcgccgctgccgaagcccattaccaggctacgccccatcagagaaacggggttgatccattcccaaatgagcgtgccagttaaggcacttcccaccagaatgaccaccaacagcacgtagcgaatgtggcgagggatcgtcgcagactgattgaggtcaaagcgcctgcgtaaccagttcgctaagtcggtaatcgggttcagcgggcagacccagctgcaaaataatcgctttcccgccagggcgtagagcacggtgataatcaccgcaccggtcaacgccaccgtggcaggcagatgaccactggcaagactttgcagcgtcatcagcggatcggtcagcggaacggtgtcgaataacaggctactgctgtagttgccgtgcaagatccacacaccaaaccatggaccgctcaaaaacatccccagcacgaagaactgacaaaggcgacgtaacaccagccaacggtgactgcgccaccagccttttttctccagcgcctcgcgcccggcgtcacgtttacgatttgccattgttcccctccagccagccgttacttagcttttgccattgttcccctccagccagccgaagcggtaatggtgacctaactcccctttcgccagactcagcggtaacaccttgattgccggttgttccagcacgcatactttttcgcacttaccgcaaccggtacaggcgtcgctgtgaaccgtcggcagaaagcgggcgtgcttaccggtacgcgtgttgcgctccagctccagggtgatggcctcatcaattttcgggcattcgcgataacaaacatcgcagcgcagcccctgaaagttgagacagttttcctggtccaccagtaccgccagccccatccgcgcgtcgtcgatgctttcaatctcacgatccagcgcaccgcttgggcacactttggcgcacggaatgtcctcacacatttcgcaaggaatatcccgtgcgacaaaatatggcgtgcccgcgctcagaccagaggccagcgtcgccagttttaaggtgtcgtaagggcaagcctgaacacactgaccgcaacgcacacaggcactggcaaaggcgttctcgtttatggctccgggcgggcgcaaccgcacgccagatgcgcgtgcggtttgctgttgtaaccccagcgccacacccacggcagccagcccgcctgctgtgcgaacgacatcgcgcagaaagcggcggcgaccattttgaggtttcgcactccgggacataatggcttacaccttctccagtttgaccgcgcacttcttgaagtccgtctctttgctgagcggatcggtcgcatccagcgtcagtttgttaaccaactgtgcggcgtcgaagaacggcatgtacaccaggccctgtggcggacggttacgaccgcgcgtttcaacaatgctgatcacttcgccacggcgagaaaccactttcactttgtcgccacggcgcagatcgcgcgctttcgcatccagcgggtgaataaacaggaccgcttccgggaaggcgcggtgcagttctggtacacggcgagtcatactgccggtgtgccagtgctccagaacgcgtccggtagagagccacaggtcgtactcttcatccggtgcttccgccgccggttcgaatggcagtgcgaagatcaccgctttgccatccggtttaccgtagaacttatagccttcgcccgctttcacgtacgggtcgttaccttcgctgtaacgccactgcgtttctttaccgttcaccaccggccagcgcagaccgcgcgctttgtggtagtcatcgaacggtgccagatcgtgaccgtgaccgcgaccaaaccatgcgtactcttcgaacagccctttttgcagatagaagcccagctcgcgggattcatcgttcagctgatcttccgccagttcggataccgggaatttgctcacttccggtgtggcatacagcacttcgtacagcgttttgccacgcagttccggtttcttcgccagcagatcttccggccatacttcttcagttttgaagcggcgggagaactggactaactgccagagatcgcttttcgcttcgcccggtgcctgtacctgttgacgccagaactgagtacggcgttcggcgttaccgtaagcgccctctttctctacccacattgcggtcggcaggatcaagtcggcggccagcgcactgactgtcggatacggatcggagacgatgatgaagttgcgcggatcgcgccagcccggcatacgctcttcattgatgttcggcccggcctgcatgttgttggtacacatggtccagtaaacattcagtttgccgtctttcagcgcacggtcttgtgccaccgcgtgcagaccgattttcgccggaatggtgccgctcgggatattccacttcttctcgcagatatcacggtgtttctcgttggtcaccaccatgtccgcaggcagacggtgagcaaaggtgcccacttcacgcgcagtaccacacgcagaaggttgcccggtcagggagaacggaccgcaacccggctgggaaattttgccggtcagcaggtgcaggttgtagaccaggttgttagcccacacgccacgagtatgctggttgaagcccatcgtccagtaggagatgactttcttgttcggatcggcatacagctgcgccagttgttctaactggtctttcggcacgccggtcatttcggcagttttttccagcgtatactcggcaacgaaggctttgtaatcttcaaagctcatcggttcggaggcgtcagaacccggattcttcgctgctttttccagcggatgggtcggacgtaaaccgtagccgatgtccgtcgcccctttgcgcaggttaacgtgcttgctgaagaagtcctgatttatcgcattgttttgaatgatatagttggcgatgtagttcaggatcaccaggtcagattgcggcgtaaagatgatgccgttgtccgccagctcgaagctacgatgctggtaggtagaaagcaccgccacggtgacgttctggttagagagacgacggttagtgatgcggctccagaggatcgggtgcatttccgccatgtttgcgccccacagcacaaacgcgtcagcctgctcgatgtcgtcatagcagcccatcggctcatccataccaaaggtacgcataaagccaactactgcgctcgccatacagtgacgcgcgttcgggtcgatgttgttgctacggaagcccgctttaaacagcttggacgcggcataaccttcccagatagtccactgaccagaaccgaacataccgatgctttccggccctttttctttcagggcggttttgaatttctcttccatcacatcgaaggcctgatcccaggtgattggggtaaattcgccttctttgtcatatttaccgtttttcatacgcagcagcggctgcgtcaaacggtctttaccgtacatgattttgggcaggaaatagcccttaatgcagttcaggccacggttaaccggtgcgtccgggtcgccctgacaggccaccacacgtccctgctgcgttccgaccagaacgccgcaaccagtaccgcagaaacggcacggcgctttatcccatttgatggcttcctgctgaccaacaacggcgcgggcaacgcccggcacgctgagaccggcagccgccgcagcggccgcaacggcgttagctttcataaagctacgacgactgagtttcatggtgtttcctcaccttgctcttcctgctggtgataaaccaggctcaccgccagcacgccctctacgttgcgtacactctcaatggtttggatcagcgtttcgctgtcttctgcttccaccaccacaatcaactgaccgctcggcgcgtcgctgacagcaacttcacagccgggaaaggcgttcagttgggtgctgatgtcactaattcgttcgcttttggcctgcacgaccaggctgcaaacttgccagttagtgtgcatggagatactccgcagttatggcacttaccggacagctggctgcacatgctccacatccgttgcaaagttggctattaagttgcggctggtagatcccggagagcgtcgggcgaaagataattgccattggctcacagctatcctgacagcggcggcattcaacactctgatacgccaggcacgcgtccccgatggtgaactgcaaatcccaggccctggtgtggcgcggagaaaataggctttcggggcaagcctgcgcgcaggcgtaacagaagctgcactcgttatttttgaaattaacgctcggatagccgcccgcgccgcgttgcagaatgttgttttcacaagcattaatacaggcgtcgcagcgggtgcaatgggtcagaaaatgagattcatcaccggaccagggcggacggataccgttactggctttgcgccagcgaccagtgagtatgccccgacgggatgcatcaatcttcacattgaccttccatcattaacgcgctctgaaaattgagagcgaccaaataaaccgcataattaataagccatttttatagccgctaagatattaaaggatgtgtcaaagatgcataccccgatcggggtaaaacctgtagcaggatcaaaagagtggcgggaagcgtggcaaaaacgggcttttgctcacatttcaaatggttataaatatatttatatagcgattgattcaccagagatatttctgctggtttgctctctcattagaatttaacactaaaagagcaggtaaaattgtctgaatgttctttaagttattcataaagcaaattaataaatctgatgaatatgttaaccttcagcgacatcatcggtgaaaacctataaatgaagaaggaaagcaaaaaaatgaagaccattctacctgcagtattgtttgccgctttcgctaccacttccgcctgggcggcagaaagcgtccagccactggaaaaaatcgcgccttatccacaagctgaaaaagggatgaagcgtcaggtgattcagttaaccccgcaagaagatgaatctaccctgaaagtagaactgttaatcggtcagacgctggaagtcgattgcaatttgcatcgtctcggcgggaagctggaaaacaaaacgctggaaggctggggctatgattattatgtctttgataaagtcagttccccggttagtacgatgatggcctgcccggatggcaagaaagagaagaaatttgtcaccgcgtatctgggcgatgctggaatgctgcgttacaacagcaagctgccgatcgtggtgtatacgccagacaatgtagatgtgaagtaccgcgtctggaaggcggaagagaaaattgacaacgcggtagttcgctaaactgccgtgaagtgcggcaccccgtaggtcagacaaggcggtcacgccgcatccgacatccaacgcccgagccggttgcctgatgcgacgctggcgcgtcttatcaggcctacaccgctgtgaagtgcggcaccccgtaggtcagacaaggcggtcacgccgcatccgacatccaacgcccgagccggttgcctgatgcgacgctggcgcgtcttatcaggcctacaccgctgtgaagtgctccaccccgtaggtcggataaggcggttacgccgcatccgacatctaacgcccaagccggttgcctgatgcgacgctggcgcgtcttatcaggcctacaccgctgtgaagtgctccaccccgtaggttggataaggcggttacgccgcatccgacatccaacgtccgagccggttgcctgatgcgacgctggcgcgtcttatcaggcctacaccgctgtgaagtgctccaccccgtaggtcggataaggcggttacgccgcatccgacatctaacgcccaagccggttgcctgatgcgacgctggcgcgtcttatcaggcctacaccgctgtgaagtgctccaccccgtaggttggataaggcggttacgccgcatccaacatctaacgcccgagccggttgcctgatgcgacgctggcgcgtcttatcagcatacgccacatccggcataccatgccggatgtggcgtatcattacaacgcaatatccgccacttctttttgaacgggttgcggtttcaactgcggtttcggcgtactatctgctgcctgcggcttgtcgtagttcaaccccagcacttcgctggtgtactgcaactcgcgttctgttgccgctacatcaccgttcagcttgcgtccataagacggaacgatcgctttcaacgtagcctgccattgcgggctggaaacacgatcgccaaatactttttccagcagattcaacataatcggcgcggcggtactcgcccctgggcttgcccccaggagcgcggcaatggttccttgctggtcactgacgacttcagtacccagacgcagtacgccacctttctcggcatcacgcttgataatctgcacgcgctgccccgcttgccacaaacgccagtcctcttttttcgcctgcggatagtactctttcaacgcttcaaaacgatcctcttcactcaacatcacctgactcaccagatatttcaccagatcgaaattatccagcccgacgtgcatcatcggcatcacgttagaggtggtggtggaactcattagatcccacaaactaccgtttttgaggaatttggtactgaaggtggcaaatggcccaaacagcactacgcgtttaccgtccagaacgcgggtatcgatatgcggaacgctcatcggtggtgcgccaacggatgctttaccgtaaaccttcgccagatggtgattaaccacgtccgggttttcgctaacaaggaactgtccgcccaccgggaaaccggcgtagtctttcgcttccggaatcccgctttcctgtaacagcttcagcgccgcaccgcccgcgccgataaagacaaatttggcacgaatgttctgtgcagtgccatttttcagatcggcaacggtaacggtccaggtgttatcgtcattacgctttagggcgcggacttcgctgctgagttgcaggctgaagttagatttcttctgcaaggaagcaattaactggcgggtgatctcgccgtagttcacatcggtaccaatttccgtacgcgtggctgccactttctgttgcggatcgcgcccttccatcactaacggtgcccactctttgatctgcgcgtgatcttcagagtaacgcataccgcgaaacaggctgctttgttgcaacgcggcgtaacgggcgcgcaggaaattgacgttatcctcgccccagacaaagctcatatgcggaacggtattgataaaactacgcggagtacgcagcacgccgcgctcaacctggtgcgcccagaactggcgggaaatctgaaatgcttcgttaatggcgactgctttttcaatactgatgctgccatcggcgttttgcggggtgtagttcagttccatcagtgcagaatgcccggttccggcgttattccagccgttgctactctcctgcgcgacaccctccaggcgctccaccatggtcatgctccattcaggctccagctcgcgtaaataggtccccaacgtggcgctcataatgccgccgccaatcaacagtacatcagtttcctgctcctcggacgctttcgcttttgccgccatgctaacggcattaagccccacggccatgctgaagagcatggcagtcacttttttcatcttgttaatgccttacttttagtcgctttattgcaggtgagatttgcgcggcatcaacggtaacacttaagtaacaacatttaaataatgtttataaattatattctaattttagaaacattataatttcgttgattaattatagggttattagaaatgaagggatttttagcatattgacctgacggcagcagtccgccaggtcagcgtcgtaatattatgccgtccgggcaacggcatcacggctagcggcatcgcgctcttcgcccgtcagctcgctaagttgcccattgcgcatttccagcaggcggtcggcgtggataaagtaatgatcatcatgactgatagcgaaaatagttttacccatctcctgcatcagcggcagcaacacctgataaaactcacgacggaagtgtggatcctgatccgccgcccattcatccagcaggataatatcgcgttcttctgccagcgccagcaacagcgccacgcgttttttctgccctttacttaacttcaggttaacaatacgcccgttgcttaactcaagcttatgagccattttcagctgcgccagccacttctcaaccagttgcgggttagcgggtttaccctccggccccagcagttgatcaaacagccagacatcggtaaacactgcgctaaacagtttgcgataatcttccggttgttcgccgctgacaggtttgccatccagcaagatttcgccgctttgtggctgatacaagcccgtcaacaacatcgccagcgtgctttttccgctaccgttgccgccaatcagaaacagcagctcgccacgtttgatggtgagattaatcggaccaacggaaaacgcgttatcctgataagcaaacgtcacgttacgcagctccagcgtttgccagttgggaaacgcctgcgggcgcggaaactctgctttgaaaggcgcgagcgcgaatttgttcagcttgttaaacgccacctgcgccgtcagcagcgtcggcaatgcgccaaccgcgctaagcagcggcgtacgcaggaataaaagcgtcaagctataggtcgcggcaacgttggtatcagcccaaccgaggctgttcgccatccagaacaccaggccgattgcgcccagcatcatgatgttactccagttcacggcactaagatggaaggtgtctgcgcgaataatatggtggcgatactcttgcgcatcaggaatgtagaggttgttaaacacatactcggcgcgttcccggttcagagtcagctctttgcgcccttcaagtacagtttgaaaatccgtgtacagcttgtcttcggtttcacgcagggtcgccatatgtttgtacacccgcgccaccagcacaaaaccgccccagatggtgatcgccatccagatagccgttaccagcaacattttgccgctcagcatccacagatacgccgcactaccgatagtgagaatgatcccctgcaccagttccggcagacgcacaaaagcaatggtgatattgcgcacatcgctggttaaccccgccagcaagctggcgctaccgagttgttcaatgcgctcgacgtgagtatccagaatccgcttgataaattcactacgcagtcggtaaacgaagtgatgccccaaagtggtgagcgccagttggcttccgagagtgactgccatcaacagcagcaataatcccagaaactccggcaacaccagcagactggtatccgccgtttcgataaggcgctgattgataaaagcaattaagccaatgcctaatgccgcactggcgaggcttagcgccatcacactgataaatggccagcgatactgccgccagacaagtacaagaagttccatgcagaaaacccggacaatgaattacagcccgcagtttaaacatcttcgcgcgcacagcaataataattcttatttttattcttttttacctgcctgacggaatgtcaggttgtagcggcagtcgatggtgagtggatgaaaccccgctttcaacggttgaataccgtgataaaacagccggctttcaccgccccataccaccacatcgccatgttccaacaacaaacgtttgagcggatcatttcgtttcaggccgccaaattgaaaaatcgcgggtaagcccagagaaacagaaacaattggcgcgcgcagatccggttcgtctttatcctgatgcaggctcagtttcgcgccaggagcgtagcggttgataagacaagcatctggctggaaatctggatagcccgccgccgtagccgcacgttgacataaattatgaaaactctgtggcatggcgggccacggtttatttgtttgcggatcaatggggctatagagataaccttgccgatgggtcgtccagcccagatgcccacagttggtcatcgccacgctcatggtatatcccccgggggtgaccatctggcgaaacgggctctggctggcaacgtcattaatatcgcggatcagttgctccgcagcgttaaaagcaaaacgccgtaaaattaccgcaccagccgccagtggctcttgccacggttcagcatcggcaaacagatccaacattacctctcctcattttcagcttcgcggcgcagcagttgcgctttacggctcacgccccagcggtaaccggaaagtgtgccatcaccacggaccacccgatgacagggtattatgatagccagcttgttggcggcacaggcgctggcaacggcccgtaccgctttcggtttgccgatggcgttagccagttgctgataactgacggtttcaccgcaaggtatcgtgcgcagtgcctgccagacttgttgctgaaaagcagtgccgcgaatgtccagcggtaacgtcagcggcgtatcgcgttgattgaggctggcgatcacttcacgcacatgttgctgaaacatcagatcggcaggcgcgttgtcggcagcgggaaacatctgctgcaactcgctgattagtgtcgcgtcatcatcgcccagcaatatcgcgcaaatcccccgctcgctttctgccaccaggcaacgacccagctcacaatcagccagcgcgtaacgcaccgccagattttcgccaccgtgacggaattgtttagccgtcatgcccagcgtttcgtcagctttgcgatagtaactgctgctgtcggggaatccggcgttaagaatagacgtcgtcacgctctcccctttcgccaggctttcgcgcaaacggcgagcgcgccaggcctgttgccaggctttaggcgtcattccggtagtcgctttaaacaaccgatgtagatgaaatggactcatcgccacctggtcggctaaggcttccagcgttacaggcgtttcctgttccagcagtcgacacgcgtgggtgattttatccaaccgatgttgctgggcattggctttttctggctgacaacgtttgcaggggcgaaagccagcggcgagtgcctcgctggcatttgcgtagaaggagacgttttcccgcaaagcatgtctggcgcggcaagacggacggcaaaagatgcctgtggtacgcacggcgaaaacgaattcgccgtcggcattcgggtcgcgggctaagacagattgccagcgttgatcgtcagttaagcatgtggcttttttcataatcagctccctggttaaggatagcctttaggctgcccggtcaccatcacgcaaaaaccaacaatcttgcgctttaatttttttcgctgacaaggaagcttttaaactgtggactcatccaggttttaaagctatcgccttctttggtgatcatataaaccgccagcccttcccggcgaacaacctctttagctttctccggcccgagtaccatcaagccagtatcccaggcatcggcttccagcgccgtcggagcaatcaccgtcacggataccagattgtgttcgatgggacgcccggtttgcggatcgataacatgggaaagacgtttgccgtccagttcgtaatagttacggtagctgccagaggtgctaatcccatgaccgttgatatccaccacagcctgaaccgcgttttctttatcggttggtttttgaatcgctacccgccacggcaggccttcaccgttcataccacggctgttcagcgcgccgcccacgctcaccagatagcgggaaatcccttcctgctccatcaagcgtgccaaatgatcggccgcatagccttcgccgacggtggagagatcgacatataaatccggcaggtctttttgcagatattgctgatggctctgattgatgaccgtcaggtgctgtaagccggttttggctttcatcgcatcgatctgttcctggctcggaatttgaaccggctgttgttccgggccaaagccccacagattcaccagcggcccgacggttatatccatcgcgccatcggtcttcgcgccaatgcgcaggctggtggtgacgatatcggccatcgcttcacttaccggccacgggcttaaactttggctgtcgttaaagcgcatcagcgcggaatcttttttataggtgctaagcagctgatcgtcggcgtccagttgggtctgaatcttttctttaagttcggcgctgcgtttggcgtcaatgcccgggatgctggcacgccagaaggtacccatagttttgccttcaagaacggtaacttcagtagcgtgggttttggcgggttgtggtttttgatcgcaaccaacaaagaagagcgcggcagccagcagtgccacgcgggtaaagcttatttccatacgtgattatcctcatgcgaacggtcgcaagagtacaccaaaaaactgagtttgtacgctgaaaacaatgaaaaaagggcccgcaggccctttgttcgatatcaatcgagattagaactggtaaaccagacccagagctacgatgttatcagtgttgatgccagcgtcacgagtgaactggttgtcgtccagcaggttgattttgtagtcaacgtaggtggacatgtttttgttgaagtagtaggtagcaccaacatcaacatatttcaggatatcttcgtcgtcgtagccacgacccaggtttttacctttagactgcaggtaagccagggacggacgcagaccgaagtcgaactggtactgagcaacagcttcgaagttctgtgctttgttcgcccaacccagggaacctacgcgagttgcgttgtaggtctgggtgtactgagcagccaggtagatgttgttagcgtcgtatttcagaccaccagtgtaggtttcagcacggtcgccgttaccgatgtaagcagcggtgttctgagcatcagtacgtttggagctggagatcgcaccaccgataccgaaaccttcgtaatcataagtgatagaaccgccgacgccgtcgccgttttgacgcagtgcgtcacgaccgttgttagttacgccactagtaaagccttcaccagatgggttgccgtttttaccctggtactgaacagcaaagttcaggccgtcaaccagaccgaagaagtcagtgttacggtaggtcgcgaagccgttaccacgctgctgcatgaagttgtcagaaccgtaggtgtcaccaccgaattctggcagtacgtcggtccaggaagttacgtcataaacaacgccgtagttacgaccgtagtcgaaagaacccacatcctggaatttcagacctgcgaatgccacacgggtccaggagttgttttcgttttcagcgctgttgccctggatctgatattcccactggccgtaaccggtcagctggtcagtaacctgagtttcacctttgaagccaagacgcatgtaggtctggtcgccatctacatctttgttgtcagagaaatagtgcaggccgtctactttaccgtacagatctaatttgttgccgtctttgttgtaaacttcagcagcgtttgctgcgcctgctaccagcagagctgggaccaggagggacagtactttaactttcatgttattaaccctctgttatatgcctttatttgcttttttatgccactgcatactgattaaccctcattaatcagtcggcaagtccattctccccaaaaatgcagaataatccaacacgaatatgatactaaaacttttaagatgtttcatttatcgctatagatgtttcaaaatgtaaatgcaagggaactttttaagattattgcggaatggcgaaataagcacctaacatcaagcaataataattcaaggttaaaatcaataacttattcttaagtatttgacagcactgaatgtcaaaacaaaaccttcactcgcaactagaataactcccgctatcatcattaactttatttattaccgtcattcatttctgaatgtctgtttacccctatttcaaccggatgcctcgcattcggttttttttacccttctttacacacttttcattattctgtgctaccacagaaaaactataacgcttgttaactatttcacaaataattaacatccgcataatttccagcaatctttgtttatttgcaattatttttgttgggctttttgtaggttatttgtacagcaaaatggcgcttgtacatctatttcccccaatgcaggatgataaatatcacgggagaatagagaatcatcaatcaggtaagagtctggaatttcacactgtaccctttatactgccctatcacttcgcgaagttttaacaggtcataaacacgaatgcgtcagaaagagacaacggccacgacccgctttagtctcctaccggggagcattacccgcttctttttactgttgatcattgtgttactggtgacgatgggtgtaatggtacaaagcgccgttaacgcctggctgaaagataaaagttaccagattgtcgacattacccatgctatccaaaagcgcgtcgataactggcgttacgtgacctggcagatctacgacaacattgccgcgacgacctccccctcctccggcgaaggtttacaagagacgcgcctgaaacaggatgtctactatctggagaaaccacgccgcaaaacggaagcgttaatctttggctctcacgacaacagtacgcttgagatgactcagcggatgtccacttatctggatacattgtggggcgcagaaaatgtaccgtggagcatgtattacctgaatggtcaggataacagtctggtgctgatcagtaccctaccccttaaagatctcacctccggatttaaagaaagcaccgtcagcgacattgttgatagtcgtcgtgcagagatgttgcaacaggccaacgccctcgatgaacgcgaaagcttttctaacatgcgccgcctggcctggcagaacggtcattactttacattgcgtactacctttaaccagccaggacatctggcaacggtcgtggcttttgatctgccgattaatgatttgatcccaccgggtatgccgctggacagtttccgccttgagccagacgcgacggcaacgggaaacaatgataatgagaaagaagggacggatagcgtcagtatccactttaacagtacgaagattgaaatctccagcgcactcaactctaccgatatgcgcctggtctggcaggttccttatggcaccttattgctggatacgttgcaaaacattctgctgccactgctgctgaacatcggtttgctggcgctggcgttatttggctataccacattccgccatttctccagccgcagtacagaaaacgtccccagcacggcggtcaataacgaattgcgcattttacgggcaatcaatgaagagatagtcagtctgctgccgctcggcctgctggttcacgatcaggaaagcaaccgcactgtcataagtaacaaaattgccgatcatttgctgccgcatttgaatctgcaaaacatcaccaccatggcggaacagcatcaggggattattcaggcgacgatcaataacgagctgtatgagatccgcatgttccgcagccaggtcgcgccgcgcacacaaattttcattattcgcgatcaggatcgcgaagtgctggtaaacaagaaactcaagcaggcgcagcgtctgtatgagaaaaaccagcaggggcggatgatctttatgaaaaacattggcgatgcgctgaaagaacccgcacagtccctggcggagagcgcggctaaactcaacgccccggaaagcaaacaactggcgaatcaggcagatgtgctggtgcggctggttgatgaaatacagttagcgaacatgcttgcggatgatagctggaaaagtgagacggtgctgttctccgtgcaggatttaattgatgaagttgtgcctagtgtgttgcctgccatcaagcgtaaaggtctgcaactgctgattaacaatcatctgaaagcacacgatatgcgccgcggcgatcgcgatgccttacgacgtattttgctgctactgatgcaatatgccgtgaccagtacgcaattgggaaaaatcacccttgaggttgatcaggatgagtcctccgaagaccgcctgacgttccgcattctggacacgggagaaggcgtaagtattcatgaaatggataatttgcacttcccgtttatcaaccagacccaaaacgatcgctatggcaaggcggacccgctggcattctggctgagcgatcaactggcacgtaaactgggcggtcatttaaacatcaaaacgcgggatgggcttggtacacgctactctgtgcatatcaaaatgctcgcagctgacccggaagttgaagaggaagaagagcgtttactggatgatgtctgcgtaatggtggatgttactagcgcagaaattcggaatattgtcactcgccagttagaaaattggggtgcaacctgtatcacacccgatgaaagattaattagtcaagattatgatatctttttaacggataatccgtctaatcttactgcctctggcttgcttttaagcgatgatgagtctggcgtacgggaaattgggcctggtcaattgtgcgtcaacttcaatatgagcaacgctatgcaggaagcggtcttacaattaattgaagtgcaactggcgcaggaagaggtgacagaaagccctctgggcggagatgaaaatgcgcaactccatgccagcggctattatgcgctctttgtagacacagtaccggatgatgttaagaggctgtatactgaagcagcaaccagtgactttgctgcgttagcccaaacggctcatcgtcttaaaggcgtatttgccatgctaaatctggtacccggcaagcagttatgtgaaacgctggaacatctgattcgtgagaaggatgttccaggaatagaaaaatacatcagcgacattgacagttatgtcaagagcttgctgtaacaaggtagcctattacatgaacaatatgaacgtaattattgccgatgaccatccgatagtcttgttcggtattcgcaaaagtcttgagcaaattgagtgggtgaatgttgtcggcgaatttgaagactctacagcactgatcaacaacctgccgaaactggatgcgcatgtgttgattaccgatctctccatgcctggcgataagtacggcgatggcattaccttaatcaagtacatcaagcgccatttcccaagcctgagcatcattgttctgactatgaacaacaacccggcgattcttagtgcggtattggatctggatatcgaagggatcgtgctgaaacaaggtgcaccgaccgatctgccgaaagctctcgccgcgctgcagaaagggaagaaatttaccccggaaagcgtttctcgcctgttggaaaaaatcagtgctggtggttacggtgacaagcgtctcagcccaaaagagagtgaagttctgcgcctgtttgcggaaggcttcctggtgaccgagatcgctaaaaagctgaaccgcagtattaaaaccatcagtagccagaagaaatctgcgatgatgaagctgggtgtcgagaacgatatcgccctgctgaattatctctctagtgtgaccttaagtccggcagataaagactaatcacctgtaggccagataagacgcgttagtgtcttatctggcatttgcaccgattgccggatgcggcgtaaacgccttatccggcctacgattcccattatttcaacaaattacattaaagtaggccagataagacgcgtcagcgtcgcatctggcatttgcactgaatgccggatgcggcgtaaacgccttatccgtcttagctatcccggcttttcctgaccctctcggcatataacgtcagcgtctgttttatcacatccagcgttaccggcttgctcaggcagctgtccataccggactccagacaccgctgtttctcttcagccaacgcattagcagttactccgattaccggcaacgtcagtcccaactgacgaatgcgttgcgtcaagcggtaaccatccatatttggcatgttgacgtcgctaagcacgatatcaatatgattcttgctaagtacattaagcgcatcgacgccatcattcgcggttttacattgatagcccaagcttcccaactgatctgccagcaaacgccggttaatcggatgatcatccacgaccagaatcatcatatcgtcattatcgctgaccgctttgtccgtactcggcagagcgttagcaggatcgtcgctctccatctcgatcaaataaatacgcgccaacaatgccggtagctcatgcggagcagccacactgtgtacccactcccctggcgctttctccagcggaataccaatatggcgacgacagaaggtcactaccgctctgccctgccattttttactcactacctcgtcagtgatcaacacatcttcgggagtcggttcctgcccttcgtatgttgtaacgacgatgccgctgcgctgcaaactggtttccaggaactgacagaggctcgcattgcggaccgccagccagcagcgtttaccactcaacccttccacgccttttttctgcgggtactgagcgccgtacaacggaatacgcacggtaaactggctgcccattcccggttcactatctacgctgatatcgccgtccatcatgctgatcagtttttcacaaatcgccagacccagaccggtcccctggaaattacgctgtacgcccgttccgacctggaagaagggatcaaacaagcgcaccacttctttcgccggtatccccacgccggtatcgcgaacacggatagagagataatcgccatccgcgcgaacatgcaaaactatacagccggtatcggtgaattttatggcgttactcaacaggttggagatgacctgctgtaaacgcatcgggtcgccatttaaggccactggcacatccggttcaataaagcagtacaagcctaactgcttgcgtaccaccagcggtaaatagttggcggtgatgtggttcatcacttcacgcggactaaactcacgcggttcgatcttcaactgttcgctttcaatcttgctgaaatcgagaatatcgctgataattttcaacaacaggctggaagagttgttcattgccgtcaccagccgatcgacgcctttcggtaactctttggtttgcaacagatccaggttaccgataatgccatacagcggcgttcgcagctcatgactgacggtggcaaggaacatgcttttactctggctcgcctgttccgctgcttgtgccatctcctgcaagctctcttccatcttcacgcggctagaaacatccaccagcacacaaatggccacgttttcattacgatagcggctatggacgaagctgatttgcagattggtattgttgctggtcaggacatcaacaaaattgacctgctgcccacagataatttgcgtcagtcgttggcggtcctcatgcgtaagcatattgagataggtatgcgccagttcgttacttaaaatattgacgccatcagcggtacgcaaaatgcagatacccactggcgcggaggcgacaatcttgcgattgaactgctcatgttcttccagtcgcagggcgtcgctttccgccggaatgaaaatacgtcgctcgtacatccgtgcgagagtaaacaatgcagctccggcaagcacattcagcaaaattgcgttaaggatcaacatgcgaatgcgttccagcaccttatcaaccggcacgctatacacgatgcttaggctactgggtggcagatttttcttcagcaccagctcccggaacccttccgtatagccaaaccaggagcgttcctgcatccagcgaggatcgcccttaattttactttctggtccggtaaggctaatcagggtatgaccattttcatcaagaatggtaacccccatcggcaacgtacccggtaagaaaaagttctccatccggatggtctgctcgacacccaaaagcgcctgcaaccggttcgccagataaactggcgtcaacgcgtaaaaatacccgacgccagggcgcggaccttcgctgatccagtagaggttactgccgctatcatcttgtggtgcatttcgatatttattgatgcgttcatgcaaagctttcaacgcggtatcgcgttccactggcatatcacgcagaccgaaattggccatgcagaggttatcgctgccgattaaaaatacccggtttagatcgtaagccgcagaaaaattatcgcgccagtagcgcataaaccacgccaaactctccagagaacctcgccaggtgttactcattgcggaacaatcggagtcggcaaacagcggttcaaacgcaggcacatccgcctgcgtttctcgtccacgcggggaaagcacaccgttttctgcgcttaagcgattttcggcgatgtacttcagctctttcatcacatcagaggtgcgttgaataaagcgctgagcctgatcggaactcagattaaattcctgacgaatttcgctttctcgctgatgtaacgcattaacgatgtaaaaaacggaactaaaagcaatcaacagccagagcactaacgccaatgctctgaacatgtagcggctggctttcagggttgtacgaaaagaagcaaggtatttcaaaggggcgaagctccgcctcaggtgaccgatggagtgtggttaaggtagcggtaaaagcgtgttaccgcaatgttctctcttctctggaatatgatacaccgccgagaaatcatcaccttaacctctgataatcgtcatataccggacaagactagtggatttcagcatgcattatatgaagtggatttatccacgccgcttacgcaatcaaatgatcctgatggcaatcctgatggtcattgtcccaacgcttactattggttatatcgtagaaacggaaggacgtagtgcagtcttatctgaaaaagagaaaaaactttctgccgtggtcaacctgcttaatcaggcactaggcgatcgctatgatctctacatcgacttaccacgtgaggagcgtatccgcgcattaaatgcagaacttgcccccattaccgaaaatatcactcacgccttccctggcatcggtgctggttattacaacaaaatgctggatgcgataatcacctacgcgcctagtgcgctatatcagaataatgtcggcgttaccattgccgcagatcaccctggtcgcgaagtgatgcgtacaaatacccctttagtttatagtggcaggcaggtgcgcggcgatattttgaatagtatgctccccattgagcgtaatggtgaaatcctcggctatatctgggccaatgaattaaccgaagatattcgccgccaggcctggaaaatggatgtgaggattatcattgtgctcaccgctggtttgctgataagcctgctgttgattgtccttttctcccgtcgcctgagcgccaatattgatatcatcaccgatggcctcagcactctggcacaaaatattcccactcgattaccacaattgcccggtgaaatggggcaaatcagtcagagtgttaataacctcgcccaggcactgcgtgaaacgcggacacttaacgatctgattattgaaaacgctgccgatggcgtcattgccattgaccgccagggtgatgtaaccaccatgaacccagcagcagaagttatcactggctatcaacgccatgaactggtagggcagccttactccatgttgttcgacaatactcagttctacagtccagtactggatacgctggaacatggcaccgaacatgtggcgctggagatcagttttccaggtcgtgaccgcaccattgaactcagtgtcactaccagtcgtattcataacacgcacggtgaaatgataggtgctttggtgattttctctgatttaactgcccgcaaagaaacccagcgccgcatggcgcaagcagaacgcctcgccacactgggtgagctgatggctggcgtcgcgcatgaagtacgtaatccgttaacggctattcgtggttatgtacagatcttgcgccaacaaaccagtgacccaatacatcaggaatatctgtccgtagtactcaaagaaatcgatagtattaacaaagttattcagcaattgctcgaatttagtcgtccacgccacagtcaatggcaacaagtcagcctcaatgcattggttgaagaaactctggtactggtacaaaccgccggcgtacaagcgcgggtcgacttcataagcgaactggataatgaattaagcccgattaacgccgatcgtgaactgctcaaacaggtactactgaatatcctgatcaatgccgtccaggctatcagcgcacgagggaaaattcgcattcaaacctggcaatacagcgacagtcaacaggccattagcatagaggacaacggctgtggcattgatctcagcctgcaaaaaaagatcttcgatccctttttcaccaccaaagccagtggaaccgggcttggtctggcgttaagtcaacgcatcattaatgcccatcagggtgatattcgcgtcgccagtttgccgggctacggcgcaaccttcacgcttattttaccgatcaacccgcagggaaatcagactgtatgactgctattaatcgcatccttattgtggatgatgaagataatgttcgccgtatgctgagcaccgcttttgcactacaaggattcgaaacacattgtgcgaacaacggacgcacagcattacacctgtttgccgatattcaccctgatgtggtgttgatggatatccgcatgccagagatggacggcatcaaggcactaaaggagatgcgcagccatgagacccggacacccgttattctgatgacggcctatgcggaagtggaaaccgccgtcgaagcgctacgctgcggagccttcgactatgttattaaaccgtttgatctcgatgagttgaatttaatcgttcagcgcgctttacaactccagagtatgaaaaaagagatccgtcatctgcaccaggcactgagcaccagctggcaatgggggcacattctcaccaacagcccggcgatgatggacatctgcaaagacaccgccaaaattgccctttctcaggccagcgtcttgattagcggtgaaagcggcaccgggaaagagttgattgccagagcgattcactacaatagccggcgggcaaaggggccgttcattaaagtcaactgcgcggcgctgccggaaagcttgctcgaaagtgaactgtttggtcatgaaaaaggtgcatttactggtgcacaaaccttgcgtcagggattatttgaacgagccaacgaaggtactctgctcctcgacgaaattggcgaaatgccgctggtactacaagccaaattactacgcattctacaggaacgggaatttgaacggattggcggccatcagaccataaaagttgatatccgcatcattgctgccaccaaccgcgacttgcaggcaatggtaaaagaaggcaccttccgtgaagatctcttttatcgccttaacgttattcatttaatactgccgcctctgcgcgatcgccgggaagatatttccctgttagctaatcactttttgcaaaaattcagtagtgagaatcagcgcgatattatcgacatcgatccgatggcaatgagtctgcttaccgcctggagttggccgggaaatattcgagagctttccaacgttattgaacgcgccgtcgtgatgaatagtggcccgatcattttttctgaggatcttccgccacagattcgtcagccagtctgtaatgctggcgaggtaaaaacagcccctgtcggtgagcgtaatttaaaagaggaaattaaacgcgtcgaaaaacgcatcattatggaagtgctggaacaacaagaaggaaaccgaacccgcactgctttaatgctgggcatcagtcgccgtgcattgatgtataaactccaggaatacggtatcgatccggcggatgtataacaccaaaacttgctatgcagaaatttgcacagtgcgcaattttctgcatagccgctcattctccttataaatccccatccaatttatcccttcatattcaattagttaaataactaaatccaataatctcattctggcactccccttgctattgcctgactgtacccacaacggtgtatgcaagagggataaaaaatgaaaacaaaattgatgacattacaagacgccaccggcttctttcgtgacggcatgaccatcatggtgggcggatttatggggattggcactccatcccgcctggttgaagcattactggaatctggtgttcgcgacctgacattgatagccaatgataccgcgtttgttgataccggcatcggtccgctcatcgtcaatggtcgagtccgcaaagtgattgctagtcatatcggcaccaacccggaaacaggtcggcgcatgatatctggtgagatggacgtcgttctggtgccgcaaggtacgctaatcgagcaaattcgctgtggtggagctggacttggtggttttctcaccccaacgggtgtcggcaccgtcgtagaggaaggcaaacagacactgacactcgacggtaaaacctggctgctcgaacgcccactgcgcgccgacctggcgctaattcgcgctcatcgttgcgacacacttggcaacctgacctatcaacttagcgcccgcaactttaaccccctgatagcccttgcggctgatatcacgctggtagagccagatgaactggtcgaaaccggcgagctgcaacctgaccatattgtcacccctggtgccgttatcgaccacatcatcgttagtcaggagagcaaataatggatgcgaaacaacgtattgcgcgccgtgtggcgcaagagcttcgtgatggtgacatcgttaacttagggatcggtttacccacaatggtcgccaattatttaccggagggtattcatatcactctgcaaagcgaaaacggcttcctcggtttaggcccggtcacgacagcgcatccagatctggtgaacgctggcgggcaaccgtgcggtgttttacccggtgcagccatgtttgatagcgccatgagttttgcgctaatccgtggcggtcatattgatgcctgcgtgctcggcggtttgcaagtagacgaagaagcaaacctcgcgaactgggtagtgcctgggaaaatggtgcccggtatgggtggcgcgatggatctggtgaccgggagccgcaaagtgatcatcgccatggaacattgcgccaaagatggtagtgcaaaaattttgcgccgctgcaccatgccactcactgcgcaacatgcggtgcatatgctggttactgaactggctgtctttcgttttattgacggcaaaatgtggctcaccgaaattgccgacgggtgtgatttagccaccgtgcgtgccaaaacagaagctcggtttgaagtcgccgccgatctgaatacgcaacggggtgatttatgattggtcgcataagccgttttatgacgcgttttgtcagccggtggcttcccgatccactgatctttgccatgttgctgacattgctaacattcgtgatcgcgctttggttaacaccacaaacgccgatcagcatggtgaaaatgtggggtgacggtttctggaacttgctggcgtttggtatgcagatggcgcttatcatcgttaccggtcatgcccttgccagctctgctccggtgaaaagtttgctgcgtactgccgcctccgccgcaaagacgcccgtacagggcgtcatgctggtcactttcttcggtagtgtcgcttgtgtcatcaactggggatttggtttggttgtcggcgcaatgtttgcccgtgaagtcgcccggcgagtccccggttctgattatccgttgctcattgcctgcgcctacattggttttctcacctggggtggcggcttctctggaagtatgcctctgttggctgcaacaccgggcaacccggttgagcatatcgccgggctgatcccggtgggcgatactctgttcagtggttttaacattttcatcactgtggcgttgattgtggtgatgccatttatcacccgcatgatgatgccaaaaccgtctgacgtggtgagtatcgatccaaaactactcatggaagaggctgattttcaaaagcagctaccgaaagatgccccaccatccgagcgactggaagaaagccgcattctgacgttgatcatcggcgcactcggtatcgcttaccttgcgatgtacttcagcgaacatggcttcaacatcaccatcaataccgtcaacctgatgtttatgattgcgggtctgctgctacataaaacgccaatggcttatatgcgtgctatcagcgcggcagcacgcagtactgccggtattctggtgcaattccccttctacgctgggatccaactgatgatggagcattccggtctgggcggactcattaccgaattcttcatcaatgttgcgaacaaagacaccttcccggtaatgaccttttttagttctgcactgattaacttcgccgttccgtctggcggcggtcactgggttattcagggacctttcgtgatacccgcagcccaggcgctgggcgctgatctcggtaaaagcgtaatggcgatcgcctacggcgagcaatggatgaacatggcacaaccattctgggcgctgccagcactggcaatcgccggactcggtgtccgcgacatcatgggctactgcatcactgccctgctcttctccggtgtcattttcgtcattggtttaacgctgttctgacggcacccctacaaacagaaggaatataaaatgaaaaattgtgtcatcgtcagtgcggtacgtactgctatcggtagttttaacggtagtctcgcttccaccagcgccatcgacctgggggcgacagtaattaaagccgccattgaacgtgcaaaaatcgatagtcaacacgttgatgaagtgattatgggtaacgtgttacaagccgggctggggcaaaatccggcgcgtcaggcactgttaaaaagcgggctggcagaaacggtgtgcggattcacggtcaataaagtatgtggtagcggtcttaaaagtgtggcgcttgccgcccaggccattcaggcaggtcaggcgcagagcattgtggcggggggtatggaaaatatgagtttagccccctacttactcgatgcaaaagcacgctctggttatcgtcttggagacggacaggtttatgacgtaatcctgcgcgatggcctgatgtgcgccacccatggttatcatatggggattaccgccgaaaacgtggctaaagagtacggaattacccgtgaaatgcaggatgaactggcgctacatagtcagcgtaaagcggcagccgcaattgagtccggtgcttttacagccgaaatcgtcccggtaaatgttgtcactcgaaagaaaaccttcgtcttcagtcaagacgaattcccgaaagcgaatagtacggctgaagcgttaggtgcattgcgcccggccttcgataaagcaggaacagtcaccgctgggaacgcgtctggtattaacgacggtgctgccgctctggtgattatggaagaatctgcggcgctggcagcaggccttacccccctggctcgcattaaaagttatgccagcggtggcgtgccccccgcattgatgggtatggggccagtacctgccacgcaaaaagcgttacaactggcggggctgcaactggcggatattgatctcattgaggctaatgaagcatttgctgcacagttccttgccgttgggaaaaacctgggctttgattctgagaaagtgaatgtcaacggcggggccatcgcgctcgggcatcctatcggtgccagtggtgctcgtattctggtcacactattacatgccatgcaggcacgcgataaaacgctggggctggcaacactgtgcattggcggcggtcagggaattgcgatggtgattgaacggttgaattaatcaataaaaacacccgatagcgaaagttatcgggtgttttcttgaacatcgacggcgaaggtaaccccattaatcaccagtcaaaacttttcaccagcgtcagctcgccagcattacgcatcggtacaataaatgtttcctgtttctcattgacgcttccttcatcggtgatcagcgtcagttgggcggtggttaattccgtttcgctgcgcccaccatagtagttgatatacacctgatagcgcccgtgaattggcgcgggcatggcgaaaatctcgggtccgtaccccgtcgtgacatccatatccagtgcaccactgtttttcagcacggtgttaccgtaccaggcgtgttcgccatcgggcgtaacaacgtgaaggtcgaggtcggtattgtccgtatcccagctgagaaccagccgtaaacgtgcacgaatcgttcctgtacccggcgtactgtaaaactgcattttttgtcggctttgcccatccgggctgatgacctgcacgctgttgctgccttcagtgaaaatataagggcgtgcaaaactaccatcggattcaattctctgcggcatactggcaccgttgaccaccagccggccctgctgaactttacccgccgcagcataattctttattttgccgcggatctgcgcactgatattttgatcatctgccatgttgacggagctcgccgggtaattgatgctttgactaaaactggcatcttcgccctctgccggatgccagccactgagcggtgcatcaatctcgacttcctgcacaccttcactgtgagcgacagggctaagcgccaccagtaacaacggaagaaaaatctttcgcatagcattagtccattaataattgtcgggtcagcgtttcgatatagttctcatcaagcccggtgggataaccatcaaaggccaggtgcagatactcatgggttaaatccagccgatcctgaagcgtaaagaagttacgaataaacagccgtttctgctgccgatcggtataggggaaaccactgactaaacggcaaaccgcaaacacgtctggttcgttgtaccccgtctcagcttgtaatatacgccgccactgcggcatttttttcgccagccaggctttcgctttgggtaataactggcaggtactgcgtggcgctccccagcggctaagactgttgtcgggataagcaaacgcgagtatctgatcgtaacgctctccctgccccgcctgggccgtggcttgccgccaggaaagtgtcccttcggtagcgcgactgccatgataatgaaccggatcgcctgcatagatgagatcctgcgtccaggcggtcatcgttcgcgcccccgtggtcgctgggctagcagaaacacgctgcgtggcgctgctgtcggggatggtcaggcaatcgccttcccgattggcgttttgctgtaaaaaagtgcgaatcgccacggtcatggctttcgctgcctcagggggcgtacttttcgcctcgcgatccagaactctggcaacgtactcttcacgatcgagatggctctgcaatttcagtttgcccttttcgctcagtaaggtcgtctcaccgtggctgacaaacgtaatgtggttaccattagtaaacgtcacacgatagcgcccattaagtacgccgggatttactgccgtcgtactcttttccgctgtgattttcttcagcggatagcgggcaaacagctccacctctacacattgcccactggcaacctgcgtcggtactggcaaaacccgattaagcaccgtcgcataacgggttagtaccgttttgctggtgccactgccagtaacccacagcggtgtaccatcggttaaccagccagcaaaaccaccctgacggatttcctgtttatcatcggcaaaccagctccaggttttcacccgtacccgactaccgagcatggatgcgacaccgattttcgcctcgtccagcaccacatccagtaagacttcctgagctttgttttgcgcgggtaacgtcgctaaactatcaagcaggcttttaaccgttacgctggtttctggcttcagcgtagtcagagacgctaaccacgcaggtgcctgacgctgttgccagtattgcccccacacatctgcgccaatatgcaaccgctgcggcgcaaaatagagcccacaggaacgtaccagcgcggtatcgcgcgttatgctctccccagcctgacaacaataaacctcttccggggagtttccgcgacactggtagggctgctccggttgatgggtatcctccagccaggcgtaaacatacagtttccacaaactccctaacggcgtggtgaggctgtcaggtaatgcactgactttggtcacgccactactgctcagctgatacagttgatcgtgctgcgcaccgcgcagcaccagttgtaacggcgtctcctccgcaagtgttggcagagtaaccaacgccaatagccagacgattcagcgccagttcacttatttcacctgcatcccggtccattcactccctgccgcaacactttgctgcgcaggtgcataggaacgcacataacgagcaggaggcagaacgaattgccctttttgcgagaagcgcagcaaatggcggaaagtgaccgttcccgtcagttctttcaccggcaccatataggccagttcgcccatttcatttcgcgctttttccagcaattgcccctgctgtttcgcggcgttgggtttattgaccgaaatgccccatgttgtgcgctcaacgtcggctcccggtggcagcggtacttccacctgaccgtagcgcagaactgcatcctgctcgctggtaagcgtgatttcatcgagatacagcgcatcgctgtcaatctcattgctggtcaccggttgcagaataaagctcatctcttcttcaccagggataagccgatacaactggcgttcaacggtcaccggaatgttactttgttgagccatttttgccggctcacgtcagcggacctgcacattttgcggcgataattcgtcaccaaaagagagaatgtccggcacgccctgaccaacccaacgccagtcttcgccccctccagttaacttatgtttagcccatgcgcccgcaggcgcaggcaaaacaactggaggcattgtcgccatatatttcgccagccagttcatggccagcgcgcgctcaatagtggattgctcagcggtcaaaccacttaaaatagcggccgtctgggtagcgtcgccaccgctattaagcagcacaaccgtgtgcgccagcggctgattgctgtttgccgctttatcccacgcatattgctgaacctgtggcatcaccgtggacttcaactgcgcttttttcagcaacgtcatggttaagacgtttgccaccgcatctgccagtggagactccggtgtatcgaggatcaggctatcattgatatcgcgggtgtcttcctcagagaaatcttcagttttagttccgcgccgggcgatagcttcatccaaccctttcaacaacgttttgcacggcaaattcatctcctgcgcccatgccagcaccagcgcccgatgcaataacggcatgttatctgcctgctccgcgtagctgtcgagcatatgctgccagtattccggttgttgcgttacgccgatcgcctggctggcctgccagtcggcgtaccatgcccatgccgtaaggaaggcgtcaccattgccatcttcaccccaccaggtaaagcgcgctccgggccccgccagttgcatcagccgcagacggttatcctgaatcatctgacgaatgtcgttagcggcggcactttgatgatcggcaagcgaacgccaggcgagactgagcgggatcagacggctaccggtgttgattacgccaccccacggttcatcgactaacgcatcaagattgttgcggaaaatctcctgcggcgtttcactactttgtagccggatattgctcgcctgctcgggcaacatcagcgcgttatcgccaccaccgagcatgacatttttctgctgttcaacgggccagctgttatccacaaaagacagttttgtgctaatgctgtcctgcacttgcccattttgttgcagttctgcacttaacaagccagattgctgaatattctgcgtcagcgaaatataattcgcccctttgtgcagcgtcagcgtctggcgcatctcagcgcctgcaaatttagtcaccagcgccaccggttcgttatcctgctgactgaagataaatagtcctgccgccggtttgtcgcccacgcgatacaccgttggcatactccacttcatgtagagatttttttccgaacgcagataagcacgcccctgcccgaccagcccgtcgccgttcatcccacgcgcggtgatacgccagcgggttaacgaatcaggcatcaggaacgtgaaatacgctttgccttgtttatcggttgtgagtgacggcatccatgccgcggtatccacctcttcacgccgtggacgttcaagcatttttactcgccgctcgctgcggttagttgcgccaggcgcaaccggctcgctggagagcgcctggtcgtagctgataaacgacagactggagctggtacgcacattgttacgccccagcggatagaaaaatttgccgatattcggcgcgatttctggttgcagcgcgtagatcatttcatcgaccacgcctaccgttagctgcgcagaaacaggtttacctttcagcgacgaggttaattcgacattgaccagttcaccaggctggtaatgggttttgtccgttttcacccggatatccagctggggaacggcaactttgatcccggcgttctgaaaactgtactgaccgttacgggtatacagcaccgaaaaagtgatgttaggcgcaaaggaattgctcactggaacccgggcttcatactgggtatcgtttaaacgttgtagcgttagccagtttgccggatgcgaaagcagcgactgctgttccacgcgatcgcgttccagcgtcaataatgcttcatcaattggctccggaaaggtaatcagcatcttcgcggtttcgcctggctggtacagcgttttatccgccacgatatctaccgtaccagtatgcgccgtgctgcccttaccgctgacggcatgacttaacccagcgagaattaagccgtctttatcgcgtaatgtcagattgtagttgccaggtttagcgaaattgacggtaaaggatttgccgcctgacggtagctctccgctatggctcgtgcggtcttcgagacgcaaccattcatacgtaacaggaacctgttttgaagattccagcgcggcataacggaacacaaccgactcgccgctattactgtattgtgcggcagtacttaatgagtaatgcgccagaccgcgttcaatgaggatctctttggtggtggtgacgcgatacgccgcgccgtcactggcggagacggttaacaaatagcggctcggtttatcggcggcggggagatttaacgccacatgaccgctggcgtcggacaccgtttcgctgccttccagcgacacggggaaacgtccggcataacgcaaatcgttaccgaccattgataattgctgagcgcgcaaacttaactgcacgcgggcattttttaccggctcgccatccgggtagagcagttgcagtttgccgctgaccgcttcgccagttttgaactcttttttggcgagagctaaaccaatctcgaaatgtggcttgatgtagtttgccacgcgaaaactgctgctatagacctgattgcggtaagcaagacgtaactcataacctccggctacgacattttctggcaggcggaaacttccctgcccgccattgcgcgcatccagcgtgacattgacggtttgcaacagactgccgttggcgtccagcaccgaaagcttcgccggggcgctgacgatgggggatgaatgcaacggatcgtggaactcgcggccgatcactttaacatcgacacgatcgcctgcgcgatatagcgggcgatcggtaaaaatatacaagcgggtgttgtagatttcgctttcgtagaagaagttctcggagacaaaaacgccgccttcagcatccttacccagaatgtatgaacgttctggcgatatatgttgtaactgcaaggtaccgctgtcatcggtcacaccgcgggtcatcacgccaagaccgtcagtccacaagatctctgagccgggcttcgcttcaccctgttttttacccgcggtccacaccagaagctctttgcctgacactttgctaagcgccacggtatcggaaacaaacaccaccgtcgtcgcccgatacccaccaaccatcgcctcgacgaggtacagtcccggctcttgttggccgagaggaatataaatgttacccggctgcggcgagatgaaattgctggatgcgccttccagttttaccccttgctgcggctcgaacggtttagcctgccatagtggataacggaactgtttcaccaggggatattttttcagcggggaaaactggttgttctgtacataacgggaaggtttaataatggcattgccgagctgtaattcgggtaacgcctgagtcacattctgccgtgactgagaagagaaagtacgctgcatcacgcggcgagatttgccgtaccagttatcccacagccaggttagcgtattgttcagcccgtcgcccagatattgcggttgcaccacaatgcgatgcaggtttttctgctggcgcaaaaatgccatcgggtcaggaatacgatacaggcgaacgtccacgccgccgtactcttccatctgatagcgccgataatcacgccccggcgcttccagtcgcactttcgcctcttcactgctgctaaaactgctgtcagcaagcaaaaagaatgttcccccggcaggcggcgcatagttgctggaaggaagcgaatcatcagcattagcaagccctgttcccacaagagacagggacaagcacgctgttatcgcgccagaaaatttaaacgataaatgccaatgaaattgggattggaatcgttgggtatccatcgggtgtccttccatgtcataagttgttgcagactgactgcgcgcattccgttgtcagttttcgtggcgcttccggtgtggtagatgacgtaacgccccatccagaccattaagtgctgggcatcgccctgatcgaaaaaaatcatatcgccaggcagcgcctggtttatgtcctggccaataaactggctgttgtactgaatcaaattaatcgcggtcacataggggccggttttcccgttcccctgattccagttttgcgccagttgacgctgttcaggtgttagcgtcatctctggcggcaaatactggctagataaaccgttactttttagccatttactgtcgtgaactttcagcgtctcgttcgccgcaaatcgcaccaggcccgcacaatcctgctgataccagcgtggacttggcccctggcggagctgttcttgtgcaatgcgtacaaaccaggcgcgaaacagcccggattgttcgacattcagcatttcgctatgggcaacaacacaacacagccagcaaatcagcgccagcagcccgtgcctcatagcggctgccaggttatgggtagccactgccaggcggcaccgggttccatctgggccagcttcatgacataacgcggttgttgagataaagcgtccagcttcggcattaataaagtttgtgcggcgttataaaaaaccggttcgagattcttcggcagactggtcaacgtttcgttacgcagcagtttcgctattccttgtggattgatatagagcggaacgatgccatcagtgggtattacatccaccattgccgggcgggttttattcagtgtttgcagcgcgttattaaccagcgtgtcatcgagggagaaaagcagcgttttgttttgcatcgccaggctcacacggaaaaaataatcgctcattaattgatcgggttgcgccgcctgcgctttcggatactggccgtatcgggaactcacttcgcgacgccagatttgcgcttcgccctgctgagtctggcttaccggcaaaacaccttctggcgctttgctttcgtgcgcaccaatattttgcgtaaacagtttccctggcaattgcgcctgttcggcagtgccatcaaactgaccgacaaacagcggggtttgcaatttactgtcttcataccagcacagccccgcggcaccgtctaacgccccattcagcttgtcgttttcctggctgatgtggctaagcatctcttcggcaataccgtgactatacggcaccgccacacagaagctggctccggcaggcatactgttccataccggcgtaaaatcgaaactggcatctacgctggcggattcatcatttaacgccacaaaactgtgccagccgtcgttacccatttcgaagcgtacgccagcaaaagaaggcattaaccgctggtagccaaaccccagccacctggcgctgactacgatgcgctggcgtactggcgttttttcggcagtacgctcttccaggccaaagcttgcttgccagcgttttttgccgctcaacaaatcacctgcgatcgccgtggcttcggtatcctgctgatcatctttaaacaacatatccgtgctggaaaacaccagcatcttgtcctgataagtcgcgaacatcagggcgttattgccgttatagcgcaactgataaacaggaacagtttcactatttatcttgatgctactgatttccgttttgcttaactggctgtcgctggtagcggcaaacaacaatggctccagcagtttgcttaaaccactgcgctggatcagcaccatataatgactaagatggccttgtttatcgtgccacagcgctgcctgcgcgggctgatctaagagactgctaaagagcttatctttcagcgtgagatcgtgttcatagacaatacgacgaatgctgccttcaatgcccagacgatcggcatgattctgataatagaaaacgaaatcttcgctcagaacatcgtggagaaacggaatggtgaggagatctttgggaagctggctcagagagtcgctgtcgagaaagaggtccggctcattgagatcgatttgcagattgttgtgcaccaccagcgggctcaacgttttttctggcccactgccagcatattgcaacgcccagacgccagcggaaagcagtgctattgcgccaaaacctacaagaccatagaaccgccagcctttcgccttttttcaccactcattgccacattccttgtgtatagccagccattttttacgggcacagccaaactttaccgtgccctaatacgacaaaagcccagactttgcagcctggacttttcaattcaaacaagggagatagctcccttttggcatgaagaagtaaaattattcttcttctggctcgtcgtcaacgtccacttccggagcgatttcatcgtccccttccgcggcactgccgtcgatggtatccagatcttcctcgtcaaccggttcagcaacacgttgcagacccactacgttttcatcttccgcagtacggatgaggatcacgccctgggtgttacggcccacgatgctgatttcgctaacgcgagtacgtaccagcgtaccggcatcggtgatcatcatgatctggtcgcagtcatctacctgtaccgcgccaacaactaaaccgttacgttcggtaaccttgatggagataacccctttcgtcgcacggctcttggttgggtattccgccactgcggtacgtttaccgtaaccgttttgcgttgcggtgaggattgcgccatcgccacgaggcacgatcagagagacgactttatcgccttcacctaagcgaataccgcgaacaccggtggtgttgcagcccatcgcacggacagaagactctttaaagcgcaccactttaccttcagcggagaacagcattacttcgtcttcgccgctggtcaggtcaacgccgatcagctcatcgccgtcaaccagtttgatcgccactttaccggcggtacgcagacggttgaactcggtgaggacagttttcttcacggtaccgttagcggtcgccatgaagactttcacgccttcttcaaactcggtcactggcaggatcgcagtgatacgttcgtcctgctccagcggcagcaggttgacgatcggacgaccgcgcgcgccacgagtggcttccggcaactgataaactttcatgctatagacgcgaccacggctggagaagcacagaatatggtcgtgagtgttcgccaccagcagtcggtcgataaagtcttcttctttaatacgtgcggcagatttacctttcccgccacgacgctgcgcttcgtattcagaaagcggctgatacttaacgtagccctggtgagagagcgtcacgaccacatcttcctgggtgatcagatcttccaggttgatgtctgcgctgttggcggtgatttcagtacgacgtttgtcaccgaactgttcacgaaccagctccagctcttcacggatcacttccatcagacgatcggcgctaccaagaatacgcaacagttccgcgatctgatccagcagctctttgtattcgtcgagcagtttttcgtgctcaagaccggtcagtttctgcaaacgcagatccagaatcgcctgagcttgctgttcggtcaggtagtacagaccatcacgcacgccgaactctggctccagccattccggacgcgcagcatcgtcgccagcacgttcgagcatcgcggcaacgttgcccagctgccacggattagcaaccagcgcagttttcgcttctgcaggcgtcggcgcatgacggatcagttcgatgatcgggtcgatgttcgccagcgccacggctaatgcttcaaggatatgagcacgatcgcgagctttacgcagttcgaaaatagtacgacgggtcaccacttcacggcggtgacgaacaaacgccgcgatgatgtctttcaggttcatgatcttcggctgaccatggtgcaatgccaccatgttgataccgaaagaaacctgcaactgggtctgggagtagaggttgttgagcacaacttcaccgaccgcatcgcgtttcacttcaatcacgatgcgcataccgtctttgtcagactcgtcacgcagcgcgctgatgccttccacgcgtttttcttttaccagttccgcaatcttctcgatcaggcgcgctttgtttacctgatacggaatttcgtggacgataatggtttcacgaccggttttggcgtcaacttccacttctgcgcgagcgcggatatacaccttgccgcgaccggtacggtaagcttcttcaataccgcgacgaccgttaatgattgccgccgtcgggaagtccggccccgggatgtgttccatcagcccttcaatgctgatgtcttcatcatcaatatacgccagacaaccgttgatgacttccgtcaggttgtgcggcgggatgttggttgccatacctacggcgataccggaagaaccgttcaccagcaggttaggaattttggttggcatgacgtccggaattttttccgtgccgtcatagttatcaacgaaatcgaccgtctctttttcgagatcggccatcagttcatgggcaattttcgccagacggatttccgtataacgcattgccgccgcagagtcgccgtcgatagaaccgaagttaccctgaccgtctaccagcatataacgcaggctgaatggctgcgccatgcggacgatcgtgtcatagaccgcgctgtcaccatggggatggtatttaccgattacgtcaccaacgacacgggcagattttttataggctttgttccagtcattgcctagtacgttcatggcgtaaagtacgcgacggtgtaccggcttcaggccatctcggacatctggcagcgcacggccaacaatgacgctcatcgcataatccagataggagctcttcagctcttcctcaatgttgaccggtgtaatttctctcgcaaggtcgctcatctaaccgctatccctctactgtatcccggattcaaaggtcgcaaattataacacagccgcgcagtttgaggtaaacctatacgctttattcacatccaatgcctgatatactcgtttgtcttgccaattacggagtagaagtgccaatgaatgccgaaaaaagcccggtaaaccataacgtagaccacgaagagatcgctaaatttgaagccgtcgcctcccgctggtgggatctggaaggtgagttcaaaccgctgcaccgcattaacccgctgcgtctgggctatattgccgagcgtgctggcggtttatttggcaaaaaggtgctcgatgtcggttgtggcggcggcattctggccgagagtatggcgcgcgaaggcgcgacggtgaccggtctggatatgggctttgagccattgcaggtggcaaaactgcacgcactggaaagcggcattcaggtggattacgtgcaggaaaccgtggaagagcacgcggcaaaacatgccgggcagtatgatgtggtgacctgcatggagatgctggagcacgtccccgatccgcagagtgtggtcagagcctgtgcgcaactggtgaaaccaggcggcgatgtctttttcagcacacttaaccgcaacggcaagagttggctgatggcggtggttggtgcggaatatattttgcgcatggtgcccaaaggcacgcatgatgtgaagaagtttattaaaccggcagaattgctgggctgggtggatcagaccagtttaaaagagcggcatatcactgggctgcattacaacccgatcactaatacttttaaactcggccccggcgtggatgtgaactatatgctgcacacgcagaataagtgaggttgatgtttggccgcgccaatgcctgatgcgacgcttgccgcgtcttatcaggcctacaaatgctccccgtaggccggataaggcgtttacgccgcatccggcaaccgtgccgactagacagtgattaccatttcaccgtcatgctcaaaaaccctgccgtctgggcaaaatcatcactccctttctgccacgccacgctgccgcgcagggacactcgctgactgatattgcccgtgactcccacttttatttcaccccgttgcttcaccgcatcgtcactgatagtgctgccatcctcttcaatttccgtgctatggggatcgtgataataattcagatctaatgttggtatgacatgaacagcggtacgccattcgctgtgtaaacccagccgcgtctgaatatcatcaccctggctttgactcacgcgcgcacggttagcggcggtaaaatcatcctgctgcacgccctgataaatcacctgcgcctgcggttcaatcaccacaccacgccccggtaaccactgataccccgcctccaggctggcgataatcccgctgctgtggtaatgatctgtgccatcttcttgttcggaaacatcattgctaaaccacgcgtattgcagccagctatccagccaggccccttgcttctgattaccgtgctgaaaccagctacttgtcagcccaacggcataaccgtggttctggttatcggcgcgagttccggtcatattgctgcggctgtcgccctggttatcgctgtagccaccaacaatcccaagcatccactcgccatccgtgccccagcgcccgctaaacagatcgccgctaagttgcaccgtagaagtgtcttcatgttgagccagttgccccgctgctgtgtaatgataatctccgccgataacacgtaaattcagcgtctgaccatcgccacctgcgtgatcgcgtcgctccatcataaacgcctgatttgccgcccgcaggttattaagataaccgccaactttggcattcaacaccggctggtaagcaggcgtaggttccgggtcgggtgttggatcaggatccggcgtgggatcaggatcgggagtcgggtctggatcaggtgggcttggcggcgttacttcttggcttcgcagataccagtcgttgttatcttccaccagcgtgtagtcatacgctcccatattgacgtagccgctgcctgccagactgaactgcgcattgttttgaaactgcgtgggatcagctgcgaaatcaaccactttaatgcctgtgcttgtcggctcaccaatccctgtaatggagttaaccaccacagttgtgttgccagcagtattaccgttcatcaccaattgatcgcttacgctgtcatcgccgtttaattcgctatcgagcagtagcgtaccgccgccggtataatcaccgtttaccgtcagcgtatcgccagcgacgccattttgcaggctaaccgcaccggacgtattggtcagattgccattaaccgtcacgttggaaagataagtcaggctgtcagtttcaaggttggtattaagctcacctgtcaacgtcacaccatcggtggcattcaccagcgtcccatcgccgttaaatagactggcattaagggcgacggaagtatcctgcccggtcaggcgcaaaaccgtaccatcgctgatgtcgatagtgccgctggaaatagcatcaatactctgaatatcctgatccgcgccagtaacgaacgttgccccatcaccaacccacagactgctagcataaggaaggatatcagcaacatcacctttcagggtgccttcttcgacacgtaccgcgctctgcgttgtaccgctggcggtcagctccagtgtaccagcccccgttttagtcaatgtactaccctcatcctgatgctgcccgctgctgtcagccatcagtgcgccccactgcgtgtctacccccgcatcaactgccacttcaccgtcggcgcgcatttcaatatcacgtccgtggcctgccgcatcactacgcgtgtcaacgtcggaggtaatctccatcacgctttcttgttgcttatcggtaaagataacctggcggttatagtgggtatctccaagctggctgttgtcgctcaccatcagcgtaccggaggcgatttgtgttgtgcccaaataactattattgtttgccagacttacctgcccgtcgctcgcatcgaccaccacgtagacgccatctttcccgtcgccgccgatatgcaaattgtcgccacctgcaagatctaccacatcctgactgccgataaccgttccgctgctgccactgacttcaaggccatcgttgtaacttgtgccgctctgccaggtggagaaatcagagagatcgagcacaccgccgtttaacacgatgctctgcggatcgtcctggagagcggtaagatctgccgcgtcgccttccaggctaagcaccgcaccatcatcaacgactatatcgccggttagcgccatgctctgcgcccctgccagcacgtagctgccgttttgcgcaatggtgagctgaccagcaccttcgatgatgccagcaaaactgccctgattaacagtaacgttgccaccagcatcgatatttaaagtgccattctgaaagcccgtcaatgcgtgcacaaaagtttgttgggtgctgccaacgtttagctcagcctgattctgatactgatcaatactccctatcgtcagaccgtagcagtcttgcggatcgtcctggcaatgcgtatcgccgacattcatcagggagttgctgcggcccagggtaacttcaccgttttcaatctgcatctcaccagtaaagtcattgttatctgcattaagtaccagatcgccggaacctgttttggtgattaacccggtaccagcaatagagtcaacagctccgtcattctctgtattgccaataaccagcgtttttccgtcggcaatatcaaaggtaacttcacttaagccgagatacataaagccacccgccgcagaggaaggaccatctccatagcctgctgcgctattgttctcatcgactaacacgcctccgttctggctgtagctgtcatcaacagaaatatcaataagatagggagccgtcacgctattggtatatatcgccccgccataaccttcggcagtgttatttgtaaaggcagtgttatttactatcgtataaccactaggatgcttgctgtcgctattattatcggtaacatcgattgccccgccatcgccatcactgtaacttgtacttgtatatgcctggttgttatcaaaaataacatcacttaaataaacgtcattattaatggtataaattgcgccacctttgccatcattagcgatgttattgcgaaacatggcgttagtgacacgtaaatcgacggcaccagtatcgttagtaccagaagaatagattgcgccaccatagccgcctgcgacgttaccggaaaaaataacatcagtaagattcagcgtactgttttctttagcaaatatggccccgccgttattatattctcctgtaacggtgttattggcaaacagagtcattccagtttcattttctggtaatagactaaattccgctccttgttgcaaaaatacggccccaccgctggcgttattggtcatatcgctaaaaaccagccattgcccatcagcgatactccagtcctgcgtaatgccactaaggctttgcctgctggcctgacaactcgctttgacatcatatccctggcaactatcagtgaccgccgcgacaccgttagcagagaaaagagatgcaatcatactcgggagtaaagataaatactccttgcgtagaaagataatccgcatattaatctaaccatcattttctataagacggcgtatttaatcgcattatacgatatggaatatctttcttttgtaaattgttcaacccggtgcaatggctattttgttattatttgatgaataatatcagtgcgtcataattcaagttaataaccttcagggatatcagttatatttaaactaaattaaagtcatgaataattttcttataatataaggtaaattaacaaaatggcttagcatttaacaataaccgaatagaaaacaaccatttcgccatcaacaatctcttacattcgcttatatattgaccacaactgatacatcagattatgtgatgactcgtgcttagatcaatttttgcaatcattagcaaaaagattaataagccatctatatcaatttatctaacctattatgccgttcaagaaatcgccgaacagttatttttaacaaatttttctcttcccattgactttcccggacaccttgtctgacctaaggtgcgcgaaagccactttttccttcctgagttatccacaaagttatgcacttgcaagagggtcattttcacactatcttgcagtgaatcccaaacataccccctatatatagtgttctaagcagcttcccgtactacaggtagtctgcatgaaactattgcggaaagaattccaaaaacaggtacgacatacatgaatcagaatctgctggtgacaaagcgcgacggtagcacagagcgcatcaatctcgacaaaatccatcgcgttctggattgggcggcagaaggactgcataacgttagcatttcccaggtcgagctgcgctcccacattcagttttatgacggtatcaagacctctgacatccacgaaaccattatcaaggctgccgcagacctgatctcccgtgatgcgccggattatcagtatctcgccgcgcgcctggcgatcttccacctgcgtaaaaaagcctacggccagtttgagccgcctgcgctgtacgaccacgtggtgaaaatggtcgagatgggcaaatacgataatcatctgctggaagactacacggaagaagagttcaagcagatggacacctttatcgatcacgaccgtgatatgaccttctcttatgctgccgttaagcagctggaaggcaaatatctggtacagaaccgcgtgaccggcgaaatctatgagagcgcccagttcctttatattctagttgccgcgtgcttgttcagcaactacccgcgtgaaacgcgcctgcaatatgtgaagcgtttttacgacgcggtttccacatttaaaattagcctgccgacgccaatcatgtccggcgtgcgtaccccgactcgtcagttcagctcctgcgtactgatcgagtgcggtgacagcctggattccatcaacgccacctccagcgcgattgttaaatacgtttcccagcgtgccgggatcggcatcaacgccgggcgtattcgtgcgctgggtagcccgattcgcggtggtgaagcgttccataccggctgcattccgttctacaaacatttccagacagcggtgaaatcctgctctcagggcggtgtgcgcggcggtgcggcaacgctgttctacccgatgtggcatctggaagtggaaagcctgctggtgttgaaaaacaaccgtggtgtggaaggcaaccgcgtgcgtcatatggactacggggtacaaatcaacaaactgatgtatacccgtctgctgaaaggtgaagatatcaccctgttcagcccgtccgacgtaccggggctgtacgacgcgttcttcgccgatcaggaagagtttgaacgtctgtataccaaatatgagaaagacgacagcatccgcaagcagcgtgtgaaagccgttgagctgttcagcctgatgatgcaggaacgtgcgtctaccggtcgtatctatattcagaacgttgaccactgcaatacccatagcccgtttgatccggccatcgcgccagtgcgtcagtctaacctgtgcctggagatagccctgccgaccaaaccgctgaacgacgtcaacgacgagaacggtgaaatcgcgctgtgtacgctgtctgctttcaacctgggcgcaattaataacctggatgaactggaagagctggcaattctggcggttcgtgcacttgacgcgctgctggattatcaggattacccgatcccggccgccaaacgtggagcgatgggtcgtcgtacgctgggtattggtgtgatcaacttcgcttactacctggcgaagcacggtaaacgctactccgacggcagcgccaacaacctgacgcataaaaccttcgaagccattcagtattacctgctgaaagcctctaatgagctggcgaaagagcaaggcgcgtgcccgtggtttaacgaaaccacttacgcgaaagggatcctgccgatcgatacctataagaaagatctggataccatcgctaatgagccgctgcattacgactgggaagctctgcgtgagagtatcaaaacgcacggtctgcgtaactccacgctttctgctctgatgccgtccgagacttctagccagatctctaacgccactaacggtattgaaccgccgcgcggttacgtcagcatcaaagcgagcaaagacggtattttgcgccaggtggtgccggactacgagcacctgcacgacgcctatgagctgctgtgggaaatgccgggtaacgatggttatctgcaactggtgggtatcatgcagaaatttatcgatcagagcatctctgccaacaccaactacgatccgagtcgcttcccgagtggaaaagtgccgatgcagcagttgctgaaagacctgctcaccgcctacaaattcggggtcaaaacactgtattatcagaacacccgtgacggcgctgaagacgcacaagacgatctggtgccgagtatccaggacgatggctgcgaaagcggcgcatgtaagatctgatattgagatgccggatgcggcgtaaacgccttatccggcctacggctcggtttgtaggcctgataagacgcgccagcgtcgcatcaggctccgggtgccggatgcagcgtgaacgccttatccggcctacggctcggatttgtaggcctgataagacgcgccagcgtcgcatcaggcacaggatgcggcgtaaaatgccttatccggcattaaactcccaacaggacacactcatggcatataccacctttagtcagacgaaaaatgatcagctcaaagaaccgatgttctttggtcagccggtcaacgtggctcgctacgatcagcaaaaatatgacatcttcgaaaagctgatcgaaaagcagctctctttcttctggcgtccggaagaagttgacgtctcccgcgaccgtatagattaccaggcgctgccggagcacgaaaaacacatctttatcagcaacctgaaatatcagacgctgctggattccattcagggtcgtagcccgaacgtggcgctattgccgcttatttctattccggaactggaaacctgggtcgaaacctgggcgttcagtgaaacgattcattcccgttcctatactcatatcattcgtaatatcgttaacgatccgtctgttgtgtttgacgatatcgtcaccaacgagcagatccagaaacgtgcggaagggatctccagctattacgatgagctgatcgaaatgaccagctactggcatctgctgggcgaaggtacccacaccgttaacggtaaaactgtgaccgttagcctgcgcgagctgaagaaaaaactgtatctctgcctgatgagcgttaacgcgctggaagcgattcgtttctacgtcagctttgcttgttccttcgcatttgcagaacgcgaattgatggaaggcaacgccaaaattattcgcctgattgcccgcgacgaagccctgcacctgaccggcacccagcatatgctgaatctgctgcgcagcggcgcggacgatcctgagatggcggaaattgccgaagagtgtaagcaggagtgctatgacctgtttgttcaggcagctcaacaggagaaagactgggcggattatctgttccgcgacggtagcatgattggtctgaataaagacattctctgccagtacgttgaatacatcaccaatatccgtatgcaggcagtcggtttggatctgccgttccagacgcgctccaacccgatcccgtggatcaacacttggctggtgtctgataacgtgcaggttgctccgcaggaagtggaagtcagttcttatctggtcgggcagattgacagcgaagtggacaccgacgatttgagtaacttccagctctgatggcccgcgttaccctgcgcatcactggcacacaactgctgtgccaggatgaacacccttcccttctggcggcgctggaatcccacaatgtggcggttgagtaccagtgtcgcgaaggttactgcggctcctgtcgcacacgcctggttgcaggtcaagttgactggattgccgaaccgttagcctttattcagccgggggaaattttgccctgttgttgccgggcaaaaggcgatattgaaatcgagatgtgaattggttgtagtgccagatacaacgcttatgcgtcttatctggcctacaacgattacatggcgtagtaatacgctttcacctgctcccagtccgctttggggattggctccagatatttttccagctggcggaagtcatgattaatcgctttatcgcgacgcaagcggcgacgacttttctccaggtcaagaaaaccagcttctgcattaccttctgttttcacatagatatggcgaacataacaacagccatgctgacgattaatgctatgcattttcttaaacgccagcgccactgctttcaacatggcttgccgtacttcgtcagaataagggcttactgcatgctgggcataccagtcagcaatgctgatgaaccccgccatatcttcagtcaccagcaacgctcgccattcaccctcaattttcaccgcttcaccaaaaacgatcttcggcacgatgacaccggcccgttccagttctttaattaccgcaacctcacggacaatcgttggtcggccgaacggataacgtacggaatgaaacagatgatgcgtcatgcgctttacatacagctttttgccgttgcgctcgacgcattgcaccccgctcataccattacggcgatagttaggctcttcaacccagtcgccctctgttgcccaccagtgattaaattcgtcgtactttgcactaactgccataccctatcgcctgtcatttttattaacgacaatgactataggtggttacctgaggaaaatcttaatgaaacgtgtcgtattaatgaatttcttttgccactactagcttgacaccgcttttacccttcatttgcagcgcatagattccaccagccactaccactaatagtgcgcccagcagataaaatgtgaatttaatcaggcggatacagcgatgaattttattcgacagggattaggcatcgccttacaaccagagttaacgctgaaaagcattgcaggtgaattgtgttccgttcctctcgaaccaactttctatcgacagattagcttgctggctaaagaaaagccggtagaaggcagtccactgtttttactacaaatgtgcatggaacaattagtggcgattggaaaaatttgatatgagacaggatggcgcatgaacgccatcctgcagtaacattactctttattaagaaattttactgccttatcagggaaatcagtaaacagcccatttacacccgctttgttatacagagcatcatataactgattcacatcaggagtgtattcaggcagtttatcactccgcacggtataaggatgcactaccagtttattctgctgagcatcttgcaccatgccagtgagtttgatattacccggctggcttgtctcctcaatcaacatatggtaatccggaccaataccatctgcatattccgccacctgtttcatggcacccggcttaaacatccagtcgtagttgtaattaacccagcttccatccggctgtttctgctgcgtttcattccagtcggtataggcaatcagctgtaccagattgagctccatgcccattttgggttccagctcattcttaatacgcttcagctcatcagcatcaaaacattgcaaataaactttatcgtctttaccggtgtaaccatatttcttcagcacttccagcgtttttgccgcaatatccttcccttcctgatgatggaaccacggcgctttgatttctggataaataccgatatttttcccggtagagtgatttaacccctgaacaaattcaatctcttcttcaaaggtgtgcacccggaagtcggacttacccattgggaaacgccccggataagtctgcacttttttaccgttttcaatatcgaaaccttcggtaaatttcaagctcttaatttcatccagcgtgaaatctatcgcgtagtaacgaccgtctttgcgcgcccgatccgggaaacgatcggcaacatcagtaacacgatcgaggtaatggtcatgcagaacaaccagattgtcgtctttggtcatcaccaaatcctgttccagataatccgctccctgcgcatacgccatcgcttttgctggcagcgtatgctccggcaaatatccactggcaccgcgatgggcgatgactattttttcgttgctgtccgccgccattgcactgcttcccatgactatagtgctcatcatgatcgccatgctaaggtttttcagcgtcaatttcatgccattagcctccgttgcgttcttgcagtaattgttcatggcgacgtttttcgccaatcatcacaacaatcaacaagataaccgccagaatgctgccgccaatcattaccataaagccgccatcccagccgaagaagtccacggtgtagccaacaatcgcgctcgccgccacgctaccgcccaggtaaccaaacagcccggtaaagcccgctgccgtacctgccgcttttttcggtgccagttccagcgcatgcagaccgatcagcatcacaggaccgtagatcaggaagccgataacaatcatacaaatcatatcgacggttgggttacctgccgggttcatccagtaaacgatagtcgcgatggtcaccagtgtcataaagaaaacgccggttgccccacggttgccacggaagactttatcgttcatccagccgcacagcagagtgcccggaatacctgcatattcataaaggaagtaggcccaggaggatttatctagcgcgaaatgcttaacctctttcagataagtcggactccagtcgaggatgccgtaacgcagcagataaacgaacacgttggcgatggcgatataccacagcagtttgttcggcagtacgtactgcatgaagatttgcttcgccgtcagctcctgttccgctttttcgttatagtcgtccggataatcatttttgtactcttcgatcggcggcaagccacaggattgcggggtatcgcgcatcatcgcaaaggcgaataatgccaccagaatggcgcagaaagcaggcatatagagcgccgcatgccagtcattgaaccaggccatccccagcaggaacagcagcggcggaataccaccaccgacgttgtgcgcacagttccacacactcacaatgccgccacgttctttctggctccaccagtgcaccatagtacgaccacacggcggccaccccatcccctggaaccaaccgcagaggaacaacagtacaaacatcaccgcaatgctgctcgtcgcccatggcacaaagcccataaacaacatcactgccgccgccagaatcaaacctgcgggcaggaaaacgcgcggattgctgcgatcgcttacgctacccatgatgaatttgctaaatccataagcaatgctgatcccgctaagggcaaaacctaaatcaccgcgactgaatccctgctcaaccagataaggcatagcaagcgcaaagttcttacgaaccaaatagtaagccgcatagccaaagaatatccccaggaaaatttgccagcgcaatcgacgataagtcggatcgatctccgcggcaggtaagcgcgctttgtgtggcgctggtttaaaaatactcaacattgatagcctccgtggcccgtggtcttatttatgattaacagcctgattcagtgagagaacctgccgtttcttgagttgccgcgatgttaagaaaacattcataaattaaatgtgaattgccgcacacattattaaataagatttacaaaatgttcaaaatgacgcatgaaatcacgtttcactttcgaattatgagcgaatatgcgcgaaatcaaacaattcatgtttttactatggctaaatggtaaaaaacgaacttcagagggataacaatgaaaactcgcgacagccaaagtagtgacgtgattatcattggcggcggcgcaacgggagccgggattgcccgcgactgtgccctgcgcgggctgcgcgtgattttggttgagcgccacgacatcgcaaccggtgccaccgggcgtaaccacggcctgctgcacagcggtgcgcgctatgcggtaaccgatgcggaaagcgcccgcgaatgcattagtgaaaaccagatcctgaaacgcattgcacgtcactgcgttgaaccaaccaacggcctgtttatcaccctgccggaagatgacctctccttccaggccacttttattcgcgcctgcgaagaagcagggatcagcgcagaagctatagacccgcagcaagcgcgcattatcgaacctgccgttaacccggcactgattggcgcggtgaaagttccggatggcaccgttgatccatttcgtctgaccgcagcaaacatgctggatgccaaagaacacggtgccgttatccttaccgctcatgaagtcacggggctgattcgtgaaggcgcgacggtgtgcggtgttcgtgtacgtaaccatctcaccggcgaaactcaggcccttcatgcacctgtcgtggttaatgccgctgggatctgggggcaacacattgccgaatatgccgatctgcgcattcgcatgttcccggcgaaaggaagcctgctgatcatggatcaccgcattaaccagcatgtgatcaaccgctgccgtaaaccttccgacgccgatattctggtgcctggcgataccattagcctgattggtaccacctctttacgtattgattacaacgagattgacgataatcgagtgacggcagaagaggttgatattctgctgcgtgaaggggaaaaactggcccccgtgatggcgaaaacgcgcattttgcgggcctattctggcgtgcgcccgctggttgccagcgatgacgacccgagcggacgtaacgtcagccgtggcatcgtgctgctcgaccatgctgaacgcgatggtctggacggatttatcaccatcaccggtggcaaactgatgacctatcggctgatggctgaatgggctaccgacgcggtatgccgcaaactgggcaacacgcgcccctgtacgactgccgatctggcactgcctggtagtcaagaacccgctgaagttaccttgcgtaaagtcatctccctgcctgccccgctgcgcggttctgcggtttatcgtcatggcgatcgcacgcctgcctggctgagcgaaggccgtctgcaccgtagcctggtatgtgagtgcgaagcggtaactgcgggtgaagtgcagtacgcggtagaaaatttaaacgttaatagcctgctggatttacgccgtcgtacccgtgtggggatgggcacctgccagggcgaactctgcgcctgccgcgctgccggactgctgcaacgttttaacgtcacgacgtccgcgcaatctatcgagcaactttccaccttccttaacgaacgctggaaaggcgtgcaacccatcgcctggggagatgcactgcgcgaaagcgaatttacccgctgggtttatcagggattgtgtggtctggagaaggagcagaaagatgcgctttgatactgtcattatgggcggcggcctcgccggattactctgtggcctgcaactgcaaaaacacggcctgcgctgtgccattgtcactcgtggtcaaagcgcactgcatttcagttccggaagcctggatttgctgagccatctgccagatggtcaaccggtgacagacattcacagtggactggaatctttgcgtcagcaggcaccagcccatccttactcccttctcgagccacaacgcgtgctcgatctcgcttgccaggcgcaggcattaatcgctgaaagcggtgcgcaattgcagggcagcgtagaacttgctcaccagcgggttacgccgctcggcactctgcgctctacctggctaagtagcccagaagtccccgtctggccgctgcccgcgaagaaaatatgtgtagtgggaattagcggcctgatggattttcaggcgcaccttgcggcagctagcttgcgtgaactcggccttgccgttgaaaccgcagaaatagagctgccggaactggatgtgctgcgcaataacgccaccgaatttcgcgcggtgaatatcgcccgtttccttgataatgaagaaaactggccgctgttacttgatgcgcttattcctgtcgccaatacctgcgaaatgatcctgatgcccgcctgcttcggtctggccgatgacaaactgtggcgttggttgaatgaaaaactaccttgtagtctgatgcttttgccaacgctgccgccttccgtgctgggcattcgtctgcaaaaccagttacagcgccagtttgtgcgccagggtggcgtgtggatgccgggcgatgaagtgaaaaaagtgacctgtaaaaatggcgtagtgaacgaaatctggacccgcaatcacgccgatattccgctacgtccacgtttcgcggttctcgccagcggcagtttctttagtggcggactggtagcggaacgtaacggcattcgagagccgattctcggccttgatgtgctacaaaccgccacgcggggtgaatggtataagggagatttttttgcgccgcaaccgtggcagcagttcggtgtaaccactgatgagacgctacgcccgagtcaggcagggcaaaccattgaaaacctgtttgccatcggtagcgtgctgggcggatttgatcccatcgcccagggatgcggcggcggtgtttgtgccgtcagtgctttacatgccgctcaacagattgcccaacgcgcaggaggccaacaatgaatgacaccagcttcgaaaactgcattaagtgcaccgtctgcaccaccgcctgcccggtgagccgggtgaatcccggttatccagggccaaaacaagccgggccggatggcgagcgtctgcgtttgaaagatggcgcactgtatgacgaggcgctgaaatattgcatcaactgcaaacgttgtgaagtcgcctgcccgtccgatgtgaagattggcgatattatccagcgcgcgcgggcgaaatatgacaccacgcgcccgagcctgcgtaattttgtgttgagtcataccgacctgatgggtagcgtttccacgccgttcgcaccaatcgtcaacaccgctaccagcctgaaaccggtgcggcagctgcttgatgcggcgttaaaaatcgatcatcgccgcacgctaccgaaatactccttcggcacgttccgtcgctggtatcgcagcgtggcggctcagcaagcacaatataaagaccaggtcgctttctttcacggctgcttcgttaactacaaccatccgcagttaggtaaagatttaattaaagtgctcaacgcaatgggtaccggtgtacaactgctcagcaaagaaaaatgctgcggcgtaccgctaatcgccaacggctttaccgataaagcacgcaaacaggcaattacgaatgtagagagcatccgcgaagctgtgggagtaaaaggcattccggtgattgccacctccagtacctgtacatttgccctgcgcgacgaatacccggaagtgctgaatgtcgacaacaaaggcttgcgcgatcatatcgaactggcaacccgctggctgtggcgcaagctggacgaaggcaaaacgttaccgctgaaaccgctgccgctgaaagtggtttatcacactccgtgccatatggaaaaaatgggctggacgctctacaccctggagctgttgcgtaacatcccggggcttgagttaacggtgctggattcccagtgctgcggtattgcgggtacttacggtttcaaaaaagagaactaccccaccagtcaagccatcggcgcaccactgttccgccagatagaagaaagcggcgcagatctggtggtcaccgactgcgaaacctgtaaatggcagattgagatgtccacaagtcttcgctgcgaacatccgattacgctactggcccaggcgctggcttaaactcctttctgatgcccggtaagcatgtggttaccgggcatttttgcgtacacgattccgtgcccaatgtatgcgttgcaacgcagtgaaaattcctctgaaaacgtctcgcaaaggctgaaactggcagatgtcaaaggcctgggataaccgtaatgtcgcgtcatcataaatatcaggtgacggacaaccatgaccgaaagtacaacctcctccccgcatgatgcggtatttaaaacctttatgttcacacccgaaaccgcacgggattttctcgaaatacatttaccagaaccactgcgcaagctttgcaacctgcaaaccttacgcctggaacccactagttttattgaaaaaagtttacgcgcttactacagcgatgttttgtggtccgtggaaaccagcgacggtgacggctatatctactgcgtgattgaacatcaaagctctgcagaaaagaatatggcttttcggctaatgcgctatgccactgccgccatgcagcgtcaccaggacaaaggctatgacagagtcccgctggtggtgccgttgctgttttatcatggcgaaaccagcccttacccgtacagtctcaactggctggatgagtttgacgatccgcaacttgcccggcagttgtacaccgaagcttttctgttggtggatatcaccatcgtacctgacgatgagatcatgcaacatcggcgtatagctctgctggaactgattcaaaagcatattcgcgaccgcgatttaatcggcatggtcgacaggatcaccacgcttttggttagaggcttcactaatgacagccagctacaaacactgtttaattatctgctgcaatgcggcgatacctcccgtttcacccgttttattgaggagattgccgaacgtagtccactacaaaaggagagattaatgactattgctgaacggctacggcaggaagggcatcaaattggctggcaggaaggtatgcatgaacaagccattaaaattgctttgcgcatgctggagcagggctttgaacgtgagattgtgctggcgacaacccaactcactgatgctgatattccgaactgtcattaaaaggagagattaatgactattgctgaacggctgcggcaggaaggacatcaaattggctggcaggaaggtaaattagaaggtttgcatgaacaagccattaaaattgctttgcgcatgctggaacagggctttgatcgtgaccaggtgctcgcggccacccagctaagcgaagccgatctggcagcgaataaccactaattaacacaggcccacagccgatccccatgggcctttgatatcaataactaccttttatgcgtggcccatttttgccacttttaaacatcgccagtcgttgatccagggcatcgctgtagagcatcgtgtcaacgccaacagcgacaaagttcgctccccacgccaggcattgctgcgccatatcaggagccacagccagaaaaccagccgctttacccgcagcacggatccgccgaatactggtttcaataattcgctgcacttccgggtgcccggcgttatccgggtagcccaagctcgcagaaagatccgcaggtccaataaacacgccatcaatcccttcgacgtcgaggatttcgtccaggttatccagtgccgttttactttccacctgcaccaacagacaaaggctatcgttaacttgcgccatgtaattctcaatgcgtccccagcgcgcagcccgtgccacactggccccgacaccacgctcaccgtagggaggatagcgcgtggcagacaccacctgacgtgcctgttcggcagtatcgaccatcgggatcagtagagtttgcgcgccaatatccaggacttgtttaatcagcggtttactgccttccaccggacggatcacgggttggctggcatagggcgctaccgcctgtagctgatgataaagatcctgaatggtgtttggcgcgtgctccccgtcaatcagcaaccagtcataaccagaagtggcggcaatttctgccatataggcagtcgtactgcttaaccacagaccaatttgcacttcgcccttgcgtaaacgttctttaaagggattgcttaataatgcgttcatcgtgttccttaacctatttaatgatgtgccacgtcggtctgcgcaacagtgcgatttacacgcagagtgaaaataatcaggctaccgatgaccgccaccgctgccagcgtcagtaatcccgccgcatcgctggcaaataacgtttctgctttcacgcgcaggatcggggcaataaacccgcccactgcaccaaacaggtttacaaaaccaattcccgcagccagcgccgtaccggaaagcagttgtgtcggcatcgtccagaacactggctgcacggcaataaacccgatagctgcaacacacagcgctacgatcgccattactggagaaagcagcccggacagaccaataccaatgcccgccgccagtaatgtcagcgctgcgacattacgccgttcgccggttttatcggaatagcgcggaataagccaggtcccaaacaaggccgcaacccacggaatggcggtgaccacgctcgctgtaaagcccacttttgttcccagcaatgccgcaacctgggtcggcaggaagaaaattaatccgtaaaccgccacctgaatggtcaggtagataatcgctagttgccagactcggccattacgcagcgcatcgctcagccgagaagtcactttctgttgttcttcacttgccagttgattgataagcaacgttttttcttgtttactcagaaaacgtgcctgctccggtgtgtcatcaagccaaaagaatgtgaataccccagcaccgactgccaacaatccttcaatcacaaacatccagaaccagccgggatgccccataaatccatgcatctccaacagcgcgccggaaagcggacttcccagtgttaacgccagcggtgcgcccatatagaacagccccataatgctggcgcgattacgctgcggaaaccattggctggtgagataaatcataccagggaaaaatccggcctccgcagcacgaagcagagtgcgaactatcagaaatttcgcttcagtatcggcccatgccatggctgcgctaagaaatccccacagcagtgttgtcgtaccaatccaggttctggcccccagtttgcgcatcaaaagattcgccggaacacccagaaacgcatataccacaaagaaaatgcctgctcccagcgcataagcttcattactcaacccggtatcaatctggtaggtctgtttggcaaaaccgatattgctacggtcgagaaacgccagcacatacagcgccaacataaacggaattaaacgcacacggtttttcttcaccacggcgtcaagcaaagcggtgctcataaaaagctccttagaatatgtgggcgttaccgttgtcacagcaacgcccggagtgattagtggctgtaggggcgtttcaaattgcagtcatgattgagttcgacgccaaaaccgggtttatcaagcacacttttatgaatacgaccattcaccggaaccggctcattgagcagaatcgggtcaaactgcggacgcatcgtactacaatccgggctggtcatcaggaattcgctgaatggcgtattggtgaaggtgatcaccgcatggtgagagtaaacagagctaccgtgcggcaccaccagttgccccctggatttggcgattgcggcaatttccaccagcgtggttaaaccaccgcaccagccaacatccggctgcataatgtcgataccggtttcactaagcgtacgaaaagattgcagtgtgccgtggtgctcaccgctggtgaccatcattccgactggcgcgttgcgtttcagttcgcgataactttcatactgctgtggcggcaggcactcttcgatccatttcaggttatagggcgcgcaagcgtgggccagtttggtcgcatagttcacgtcctgactcatccagcagtcgagcattaaccagaaatcctcaccgcatttttcacgcatatccgcgaccatagcggcatctttgcggatccccgcatcgccatcatgtggcccccagtgcgtcggcattttgccaccgataaagcccatctcttttgccagatccggacgcgcacctgtggcgtagaactgaatctcatcacgaacagcgccgcctaaaagtttataaaccggaagcccgaccactttgccgaacagatcccacagagccagatcgacacaagaaatcgtattcatcaccaggccaccagagccggagtaatacagggtggcactgagcatttgatcgtggatcagtttgatatcactgacacatttaccctcaatgaaacggttaagatgtttttcgacaataaaacagcccatttcaccggctgtgctaacggcgaatccggtctggccgttttctgcttcgacttcaacaaccaacgtgccaagaacgttaatgccaaaactctggcgactctgctcgtaatcgcggtatttactcatcggggtggcaatatgatcgtctatccagtgattcgccccctggtcgtgataatcaccgccgccagcgcctttttctgctgtcgcaccgccagtaaaccaggcgcgaacctgtttaatttttggtagggtcatgatgttctccattgttaactggcttgtaagtcaaagggacttttccatcccaacagacgactaatatccctggcgcaggcaatggccttgcccgccagataatcacggtattcttcattgatttgtaagcgggtaccgaccacgctgatcgcagcggtaagctcgttattggcgttaaacaccggcgcagcgacacaacggacatcggcgtaatcttcgccgttgtcatagctccagccctgacggcgaatacgcgccagttcttcgtgaagttgctgtggatgagtaatcgttgtgggtgtcgcctgctcccagaccagcccttcgataatactttgctgtaccgctgcaggttgccaggcaagcaggcatttacctattccggagcgataaaggctaaggctttttccttcatgggaacgcacgctgatagtggcactactctccactttcaaaatgtaataagcgctgccgttatcaataatccccaggtgacataacagcccggtggtatccatcagttgcgtcaaacgcggtcgagccagttcccggagatccatcttgcttaacgcatgaccggaaagctccaccagcctggtccacaaacaaaaattttcctggtgatcaaggctaagaaaacgctgacgcctgagttcattaagcagcaaataggccgtgcttttagggattcccaatgtgtcaatgatcgtcgcagcactacaggggccaatgcgggcaatcaaattgagaatatcaatagcccgtgtcagggcgggaactttgctactttccaacatactggactccagtcttagatactggaatcagtctcgttgctcagggggagtaaaattgtgaagcgcatcaaatcccgctcctcgtccagcagactggagaaattacgcacaaatttgtgaatcagcgcacggattttttcttattgagtacaacaggttggacaaattttgccggagggggaatgtgccggtgcagtaaaccggcacagagtggcggaatcagacagataaggtcatggactcaacaacctcaatccagccatgctcactggcgatatcctggccgtttaaccaacggcgcagcatattcagtgccatcattgcgcacacttcctgacggatagccaggctgtagcgcgtagtgctgaaacgcacacgcagagcgaaagtgccgtctggcgtggctagcgcaaagttgagatgctcgttctcgaaaccgctaacagccagtgccagcccggcaaaatggttggcccgccgttctgtaatccagtgcgcagtttgcgccagggtttcctcctgactaggaaccacttcacacgccagcaatggagcacctgcgcgagaaagttgcaaagccaataaaccaccggtgaattgctcgctcaacgtcaggctgaactggcggttttgcaattcgcgactgatctgcgcgggcagtccttcagtgccttcgaaaatcacgctctgtccggcaacacgtttaacatccagccacagtttttccatcgcctgttgctcgcttgccggtccggtgagtttcagttcgatgataggcatactggagcgatagcccattgttacgcccggcggcagttgtagagtgtccaggctttgtgccagatcgctttcgctacgaccaaaagtagtcaaacgcagacaaaccggcggctgcggtaaagaaaaacgctcgcgcaggcgcggcaggatttcgtgctcgaccatcaccttaaattcactcggtacgccgggagtaaagaacatcaggcaacgattaagctgcacggcaaaaccacaggcggtgcctaccgggttattgataaattcagcactggcaggcagctccgcttgtttacggttgctcggtgccattactcgtccacgttcgtggaaatagcgttccatctctttgagccaggcttcatgcagcaccaggccttcaccttttgctgtcgcagcggcgagtgcgcttaaatcatcgctggtcggtcccagcccgccgttaacgatcagcacatcggcgtgctgactacgttcgcgaagaatggtgactaagtcatcaaggttatcccccaccgtattgcggcgagataatggcaacccctgatgaaagaaaaaatcggccagccaggcagcgttagtgtcaacgatttgcccgtgtaacacttcatccccggtggataacatttccacttttaacatggttatctcctgcttttgttatcgaatcactataacgcaaagggagataaggcgtagtaagaaactgaatggcgcgacagaatgccgcgccggaagggatcagaaactggcgttaaccccaacatacgggccgtcagccacggcgttgtcgcggttaccgtctttaccgctcagattcaggtagcgataacccgcctcaatactgactggacgcataatggtgtaacgcgcgccagcattcgcttcttcataactttgaataccgctggagaggctatccggagagtagtaatactcgccaaacaaacggaagctgttgccaattttccactgcaaaccacctcctaccgctgcggcataaccttcatcgccgtaattcgggttggtgtaaacgccttttccgccaacggtcgccattaacggcccgagaggcagattcaaccccagccccacgccagcgacatcaccgtcgtcgtcgttatgtgtccagttaccgcttaacgccaggcccgtcgtttcagtcccaaaaccgacaccaatattggtgtattctttacccgcctgaccgctgatgctcattgcattgacgcttgcagaaaccaacagcattccggccagacctgctagcgcaatttttttcattatcccctttcccacaagcaattaatcaaaattcccaaagctgcgggattgtactgcctggcacagaggattcaatgagcgaaaaaaaggatctagtcacttattgtaactaaatacttcttaaataattaaatgccgaaaaaataaacacactttatcgatacacacaaaaataataataagtacagttatcatcgcaaaagagattactgtcactttcacatatttgtgagttaccgtattctcatggtttctttttatttataaggaatatccctgtgcgacaacggactattgtatgccctttgattcaaaatgatggtgcttatttgctgtgtaaaatggccgacgatcgcggcgttttccccggtcaatgggcgattagcggtggcggcgtggagcctggcgaacgaattgaagaggcactacgccgcgaaattcgcgaagaactgggagaacagctgcttttgacagaaatcacgccgtggaccttcagcgatgatattcgcaccaagacgtatgcagatggtcgcaaggaagagatttatatgatttacctgatttttgactgcgtttctgccaaccgagaagtgaaaataaacgaagagtttcaggactacgcgtgggtaaaacctgaagatctggtgcattatgatttgaatgtcgccacccgaaaaacgttacgtttgaaaggtcttctgtaacaatgatgacagccattactggctgtcagattgaaaatttagtggttaacgaattccccatccagataaactttgcctttttccacatgcatgactaaaccatccagataatcaggtttaaatgtcgcgtcacgcttatctttagcaatatatgtcaggcaatgattatgggtgaaaataacgatatttttatcaggcgctttgctttgtaagtccttaattgcactataaatctcattaccgcactgaagaagtcgtttatctaccgtcaattttttacccgcactaaaccaggtagcgctctgaatggtccggacggtattactggaataaagatcgaaatcagggatatcagcactaaaagcgttgcccagttcacgggcatcctgggtacctttaaccgtaatacctgttttatcactcaagcattgattggtactacggtcgcaacgttcagcatgacgaaacaaaacgacaaccgggtgctgctgtgccagtctggccagtgttttattgtcgatacgtggcaaaccattgctactccaggcggcatgagtacccagtccggcaattgcagcgagcgccagtaaaatgatgatatattttttactcttcaagctagagcggcaaaaagctaacacgtaaactccacctatagacaagcgcaaccagacaattaccgtgaaattgagctacatttctggcgataattcgcagttggtgtaatattaaaaatcctacgatgtcggcaaaatgcctcaaaattttgccaaatgcaaagcctaaataagaaaaaatataaaaatttcaatatttacgtctaatattagtttcttaaggttaagttaatattctatccttaaaatttcgctccaaatggcaaaatatacacaacactctttatagcaaatataagtggacaggtattcaatggcggaaggaaaagcaatgagtgaatttttgccttttagccgaccagcaatgggcgtggaggaactcgctgcagttaaagaggttctcgaatccggttggatcacaaccggtccgaagaatcaggcgcttgagcaagctttttgccagttgacgggaaatcagcatgccatcgcggtcagtagtgccaccgccggaatgcatatcacgctaatggcgttgaaaattggcaagggcgatgaagtgattacgccttccctgacctgggttagtaccctcaatatgatttccttgttgggtgcaacgccggtaatggtggatgtcgaccgcgatacgctgatggtcacgcctgaagctatcgagagtgccattacgccacgcactaaagccatcattccggtgcattatgccggtgcgccagcagatattgacgccattcgcgccattggcgaacgttacggcatcgcagttatcgaagatgctgcccatgccgtcggtacgtattacaaagggcgacatattggcgcaaaaggtaccgctatttttagttttcatgccattaaaaatattacctgtgctgaaggtggcctgattgtaactgataatgaaaaccttgcccgccagctacggatgctgaaatttcacggtctgggtgtcgatgcctatgacagacaaacctggggccgtgcaccgcaggctgaagtcttaacaccgggctataagtacaatctgaccgatattaacgccgcgattgccctgacacagttagtcaaattagagcacctcaacacccgtcggcgcgaaattgcccagcaatatcagcaagcactggcagctctcccctttcagccattaagccttcccgcctggccgcacgttcacgcctggcatctgtttattattcgtgtcgatgaacaacgttgtggtatcagtcgcgatgcgttgatggaagcgttaaaagaaagaggcattggtaccgggttacatttccgcgccgctcacacacaaaaatattatcgcgagcgttttcccacgctgagcttaccgaataccgaatggaatagcgaacgcatctgttctttgccgctgttcccggatatgactaccgccgatgccgaccatgtcatcacagcccttcagcaactcgcaggacaataagccatgtttgaaatccaccctgttaagaaagtcagcgtggttattcccgtttataacgagcaggaaagcttaccggaattaatcaggcgcaccaccacagcctgtgaaagcttggggaaagagtatgagatcctgctgattgatgacggcagtagcgataattccgcgcatatgctggtcgaagccagtcaagcggagaacagccatattgtgtctattttgcttaaccgcaattacgggcaacatagtgcgattatggcgggattcagtcacgttactggcgacttaattattacccttgatgccgatctccagaatccgccagaagaaatcccccgcctggtggcaaaagccgatgaaggttacgacgtggtagggactgtacgccagaaccgccaggacagctggtttcgtaaaaccgctagcaagatgattaaccggcttattcagcgcaccactggcaaagcgatgggtgattacggttgtatgctgcgcgcctatcgccgtcatattgtcgatgcgatgttgcactgccatgaacgcagcacctttatcccgattctggcgaatatcttcgcccgccgtgccattgaaattccagtacatcatgccgagcgtgagtttggtgaatccaaatacagttttatgcgcctgattaatttgatgtacgacctggtgacctgccttaccacaacgccgctacgtatgctgagtctgctcggcagcattattgcgattggaggttttagcattgcggtgctgctggtgattttacgcctgaccttcggaccacaatgggcggcagaaggcgtctttatgctatttgccgtgctgtttacttttattggcgctcagtttatcggcatgggattactcggtgaatatatcggcaggatctacaccgatgtccgcgcccgcccccgctattttgttcagcaagttatccgtccatccagcaaggaaaatgaataatgaaaaccgtcgtttttgcctaccacgatatgggatgcctcggtattgaagccctgctggctgccggttacgaaattagcgccatttttacccatactgataatcccggtgaaaaagccttttatggtagcgtggctcgtctggcggcggaaagaggcattccggtttatgcgccggataacgttaatcatccgctgtgggtggaacgcattgcccaactgagcccagatgtgattttctctttttattatcgccatcttatttacgacgaaattttgcagctcgctcccgcaggtgcatttaatctgcatggtagcctgttaccaaaatatcgtggtcgcgcgccgctgaactgggtgctggtcaacggtgaaacggaaactggcgttacattgcaccgaatggtgaaacgtgccgatgccggggccattgtggcgcaactgcgcattgccattgcgccagacgatatcgctattacgctgcatcataaattgtgccatgccgcgcgccagctactggaacagacattacccgccattaaacacggtaatattctggaaatcgcccagcgcgaaaacgaagccacctgttttggtcgcagaacgccggatgacagtttccttgaatggcataaaccggcatccgtactgcacaacatggtacgtgccgttgccgatccgtggccgggtgccttcagctatgttggcaatcagaaattcaccgtctggagcagccgtgttcatcctcatgccagcaaagcacagccggggagcgtgatttctgttgcgccactgctgattgcctgtggcgatggcgcgctggaaatcgtcaccggacaggcgggcgacggcattactatgcagggcagccaattagcgcagacgctgggcctggtgcaaggtagtcgcttgaatagccagcctgcctgcaccgcccgacgccgtacccgggtactcatcctcggggtgaatggctttattggcaaccatctgacagaacgcctgctgcgcgaagatcattatgaagtttacggtctggatattggcagcgatgcgataagccgttttctgaatcatccgcattttcactttgttgaaggcgatatcagtattcattccgaatggattgagtatcatgtcaaaaaatgtgatgtcgtcttgccgctggtggcgatagccacgccgattgaatatacccgcaacccgctgcgcgtatttgaactcgattttgaagagaatctgcgcattatccgctactgcgtgaagtaccgtaagcgaatcatcttcccgagtactagtgaagtttatgggatgtgtagcgataaatacttcgatgaggaccattctaatttaatcgtcggcccggtgaataaaccacgctggatttatagcgtaagtaaacaattacttgatcgggtgatctgggcctatggcgaaaaagagggtttacagttcaccctcttccgcccgtttaactggatgggaccacgactggataaccttaatgcagcgcgaattggcagctcccgcgctattacgcaactcattctcaatctggtagaaggtagtccgattaagctgattgatggcggaaaacaaaaacgctgctttactgatattcgcgatggtatcgaggcgttataccgcattatcgaaaatgcgggaaatcgctgcgacggtgaaattatcaacattggcaatcctgagaacgaagcgagcattgaggaactgggcgagatgctgctggcgagcttcgaaaaacatccgctgcgccatcatttcccaccgtttgcgggctttcgcgttgtcgaaagtagcagctactacggcaaaggatatcaggacgtagagcatcgtaaaccgagcatccgcaatgcccaccgctgcctggactgggagccgaaaattgatatgcaggaaaccatcgacgaaacgctggatttcttcctgcgcaccgttgatcttacggataaaccaagttgacctaagatcttacggataaaccatcatgaccaaagtaggcttacgcattgatgtcgatacctttcgtggcacccgtgaaggcgtgccgcgtctgctggaaatcttgagtaagcataatattcaggccagcatttttttcagcgtcggcccggacaatatgggccgccatctctggcgactggtgaagccacagtttttgtggaagatgctgcgcagtaacgcggcaagcctttatggctgggatattttactggcaggtacggcctggccaggtaaagagattggtcatgccaatgccgatatcattcgtgaagcggctaaacatcacgaagtcggcctgcacgcctgggatcaccatgcctggcaagcccgtagcggtaactgggatcggcaaacaatgatcgacgatattgcacgcggtcttcgcactctggaagagattatcggtcaaccggtaacctgttctgccgctgcgggctggcgtgccgaccagaaggtgatcgaagcaaaagaagcgttccatttgcgctacaacagcgattgtcgtggggccatgccgttccgtccattgctcgaaagtggaaaccctggcactgcgcaaattccggtgaccttacccacctgggatgaagtgattggtcgggatgtgaaagcagaagattttaacggttggttactcaaccgcatcctgcgagataaaggcacgccggtttataccattcatgcagaagttgaaggctgcgcttatcagcataattttgtggatctcctcaaacgcgcagctcaggaaggcgtgacattttgccctttaagcgaactgttaagtgagacgttgccgctcggacaagttgttcgcggaaatattgccggacgtgaaggctggctgggttgccaacaaattgcgggtagtcgctgatgaaaagcgtacgttaccttatcggcctcttcgcgtttattgcctgctattacctgttaccgatcagcacgcgtctgctctggcaacccgatgaaacgcgttatgcggaaatcagtcgagaaatgctggcatccggcgactggattgtgccccatctgttagggctacgttatttcgaaaaacccattgccggatactggattaacagcattgggcaatggctatttggcgcgaataactttggtgtgcgggcaggcgttatctttgcgaccctgttaactgccgcgctggtgacctggtttactctgcgcttatggcgcgataaacgtctggctctactcgccacagtaatttatctcagtttgtttattgtctatgccatcggcacttatgccgtgctcgatccgtttattgcattctggctggtggcgggaatgtgcagcttctggctggcaatgcaggcacagacgtggaaaggcaaaagcgcaggatttttactgctgggaatcacctgcggcatgggggtgatgaccaaaggttttctcgcccttgccgtgccggtattaagcgtgctgccatgggtagcgacgcaaaaacgctggaaagatctctttatttacggctggctggcggttatcagttgcgtactgacggttctcccttggggactggcgatagcgcagcgggagcctaacttctggcactattttttctgggttgagcatattcaacgctttgcactggatgatgcccaacatagagctccgttctggtactacgtgccggtcatcattgccggtagcctgccgtggctgggattactccccggtgcactgtacacaggctggaaaaaccgcaagcattccgcaaccgtctatttgttgagctggacgataatgccgctgctgtttttctccgtcgctaaaggtaaattgcccacctatattctttcctgctttgcatctctggcaatgctgatggcgcattacgctttgctggcagcaaaaaataatcctctggcgctgcggattaatggctggattaacatcgcttttggcgtcactggcattattgccacatttgtggtctccccgtggggaccaatgaacacgccggtgtggcaaaccttcgagagctataaagtcttttgtgcctggagcatttttagcctatgggcatttttcggctggtacaccttaacaaacgtcgaaaagacctggccttttgccgcgctttgcccgctggggctggcgttgctggtaggatttagtattcctgacagagttatggaaggaaaacatccgcaattttttgtcgagatgacacaagaaagtcttcagccaagccgctatattcttactgatagcgtcggtgttgccgcaggtctggcatggagcctgcaacgcgatgacatcatcatgtatcgccagacaggtgagttgaaatacggccttaattatccggatgcgaaagggagatttgtcagcggtgatgagttcgcaaactggcttaatcaacatcgtcaggaggggattattactctcgtgcttagcgttgaccgcgatgaagatatcaacagtctcgccattccgcccgcagatgccatcgatcgtcaggagcgtctggtgctgattcagtatcgtcccaaatgatctggctaacattagtctttgccagcttgcttagcgttgccgggcagttgtgtcagaaacaggcaacctgctttgtggcgataaacaaacggcgcaaacatatcgtgctgtggctgggactggcgctggcttgtcttggtcttgccatggtgctctggctgctggtcttgcagaacgtaccggtaggcattgcttacccgatgttaagtctgaattttgtctgggtgacgctggctgcagtaaaactgtggcacgaaccggtaagcccgcgtcactggtgtggggtggcgttcattattggcggcattgtgaacctcgggagtacggtgtaatgggcctgatgtggggattattcagcgtcattattgccagtgttgcgcaattaagcctgggttttgcggcgagtcatctgccgccgatgacgcacttatgggattttatcgcggctctgttagcttttggcctggatgcccggatactgttactcgggctgctgggttatctgctttccgttttttgttggtataaaacgcttcataaacttgcgctaagcaaagcctatgccttgctcagtatgagttatgtgctggtatggattgctagtatggtacttcccggctgggaagggacttttagcctgaaagcactactgggagtagcctgtattatgagcgggttgatgctgattttcctgcccacgacaaaacaacgttactgagttttccctgccactttacactgccgttcccactcatcggggctataactgcttgcgctgaggactttcaccgtatgcagcttttcacgattaatacaataaagcgcattctgcaaagggctgagtaaatcccccactttcacggcgaagtcactcttcacttcggcgatcatttttatcgcgccgccagcatcgcagagcataagtacatgtctgttatcttgtttattgcagcagctttttttgaccagccattccattgcattatcctgtttgctaagagttttcacatcaatttacagattaacagataaactctttatcaacggcaatggaatggcagaaatgagaagtgaaacggagggttaattattgctgacgttgcacccactcttttagcgcctgacgactaattttaataccgccgtttttcagctccggcggcagagttagccagcgcaccggttgttgaaaacgggccagcttatctttcacccattcactaagatcaacgctctcgtggtcatactccatcaccgccaccggtcgatgaccaaactccttgtcggcaacggggacgataaacacctgcaaaaccgcaggatgtgcagcaattacgcgctcgacttcttccggctgaataccctctccgccactgaagaatagattgtctaaacgtccgacaatggtcagcttgccattatgcatctcaccgcgatcgcgcgtagcgtaccagccttcgtcattaaccagactaaccagttgcccgttacgccagtaaccttctgccatactggcagcccgcagccacacttcattattaacgattttcacttcccgacccggcagcgggctaccaacgtctgccaggccgtcggcttctttcgcacacaccgtggaggcaaactcggtcagaccatagccgcaaaagcaacgaatcccctgctcgcgcgcctgttccgtcaactcgaccgggatagccgcgccgccaagtaacaccgctttcagggaaacggaactacggttaaccagcaaacgccagagttgtgttggcaccagactagcgtgagtacagcctgccagcatttgctccaatggctgtttatcacgtaccgtcatccgcgcaccagcgtataaccagcgccacataattccctgaccggagacgtgaaacagcggtaaagagagcaaccaatcatcgtgatcgccaaacggaatcaggcttaacacaccttgcgcactggcaagatgggcctgataagtatggacagcggctttcggcaaaccggtagaaccgctggtcaacgtcatactgcacagacgcgtcggctgccacgtagcggcatgtgcgccttcaaccagctgaatgtgcaggctcgttaatgccggaaacgtgttttccccatccggcaccagagcaaattgcagcgtcagattgggcagcaattcttcaagcaacggttgcggcagctgagggttcacgggcaacacccgcgccccgcattgcagtaacgccagccaggcgagcagcgtttgcggcgtattccacgcccgcaacatcacgccgctgccctcaaccaccccctgcaccgcaaatccggaggctaattcatcgacgcgagcacaaagctcgcgccagttgagttgctcgtcattaagacgtaaggcgatggtttctccccgcacttgccgccagtgacgccacggccagtcagagaagatcataacaaccgctccagtgcatcaacttccacgacaggcagcgtgctacccggccagcgacgtacctgctgcgcctgcatcagatccagcgtgtccagccctggaatggtgtccggcgttaaccaggcggcaatccgcgccagttgcgttaagcctaagctgctttcaatggaagaactgatcaccgccgtcagccccagcgcgtgcgccgcctgtacctgctcgcgtactttttccagactgcccgtgagcgtgggtttgataactaccgcgcgcacgccctcttcagccacaaaggcaaaatccggctcgcgcaggctttcatcccaggcaatggcaatgccggtttcacgggcaaacgctcggctatcatcgcgggttttgcacggctcttcgagaaacgcgatgcggtcgcgataatccgggttaacgtatttggcaaactgctgacctttcagcggtgtccaggcgcgatttgcgtcaagacgcaaatgcagatccggaattgcctccagcaacagattcaccaccatgccgtcgcgcaccgcttcgtacaatcccactttgaccttcgccactttctcgcctggcatatctgcaagtttgaggatcagatcgtccggatcgccattacacagcggtgccgcacggtagttggctgcttgcggcaacgtatctgtcagttctgccaatgcacagcttacgccaaaggccacggaaggcatctgcggtagctcgcaatcgcctgccagccagttatttacccaggcaagcagcacactttgcgcctcttcccaggtttcctgactgaagcccggcagtggggagatctccccccacccttcgcgctcgccttcacgcaggcaaacatacagcccgtcgcgggtttttaaccgcctgtcgcgcagaaccacccccgcgtccatggggatctgccagcggtatacctgcgcgctacgcattacggattccgtttgaatttgctgaagtcaggctgacgtttctggttgaaggcgttgcgaccttcctgaccttcttccgtcatgtagaacagcatggtggcgttgcccgccagctcctgcagccccgcctgcccgtcacagtcggcgttcagtgcagctttcaggcagcgcagcgccatcgggctgttttgcagcatttcgcggcaccaacggacggtttctttttccagatccgccagcggtaccacggtgttcacaaggcccatatccagcgcctgttttgcgtcgtactgacggcacaggaaccagatttcacgcgcttttttctgcccgacgatgcgagccatgtaggaagcgccccagccgccgtcgaaggaaccgactttcgggccagtctgaccgaagatggcattatctgccgcgatagtcaggtcgcacatcatgtgcagaacgtgaccgccgccgatggagtagccagccaccatcgcgacaaccggtttcggacaggtacggatctgacgctggaagtccagcacattcaggtgatgtacgccggaatcatctttatagccgccgtaatcaccacgcactttctggtcaccaccggagcagaacgctttatcgcctgcaccagtcagaatgatcacgccgatgttgtcgtcataacgcgcatctgccagcgcctggatcatctcttttaccgtcagaggacggaaggcattgcgcacctgcggacgattaatggtgatttttgcgataccgtcggtggatttttcataacgaatgtcctcgaaaccttcggagcagtcgtgccattcaaccggtgcgtaaagcattgcttcatcaggataaatcatattgtgtcctttagtcagaaacgcaagatctgcgccagacttgcgattacgccagcgggattttcccgatgcgcgttatgtccggcgcgaggaatgacatggcagtcggcagccagttccgccgccagggcgcggaatttgctgtcacgttcaccacataaataataaaacgcaaatgtgcgggcgctaaggttagcacgtaaatcaggctggacggcgagagaagtcgcctccagcatggcggcaagcgttgcgccattattgttgctgcgcagcgccaccagctcccggcgttgatcgtcattgagactggcaaaaacaggctgttgataccagtcggcaaataccgccgttaacggttctgtgagaaaacgctgcacccattggcgatcggaacgctgacgttccgcacgttgttcagcattttgcagccccggatgcccgccttcgacaataaccccacaaagccccgccagcccctggcaagccgccatcatcgccacccgtccaccaaggctgtaccccaccagccagaagtcaaggatgttgtaactaaccaaggttttacgcagtaagtcggtgacatcatcaaatccatcgacgctaatcgccgcgctaccaccgtgacctgggagatcaacatacaaccgactgtagtcggcaaacgcctcgcccacttcttgccattcgtggcaatcgccggaaaaaccgtgcaaaaacaccagccagggtaaacctggttttccgtgttttgcctgcgcgtgcaggatcataaatggcttacctgcgccagaagttgctggagcgtttgcgcaccatcggtgtcgttaaccaccatttcaatcaccgtggtggttggcgtgcgccaggcgtcggcaaatgccgtttcaagttcctgccagttttgcggacgatgatatttcagctcgaacatcgcggcggcgtgctcaaaatggacgttttgcggcatcagatagaaacgctcacgctcgctttgcggcgttggcaacaggctgaaaatttgcccgccgttgttgttcaccacaattaataccagcggcgcagaaacctgacgcaataacgccagcgcgttgagatcgtaaagtgcggagagatcgcccacaatcgccagcgtcggtttgccgcttgcccgctgaacgccggcggcggtgctaagcagcccgtcgataccgctggccccacggttgctgtacaccgggtaacctgccggaagttggctaagcgcatcaatcagacgtaccaccaggctgttaccaacaaacaattgcccctgttcaggcagatagtcgcagatgcgatgcgccagttgcgcttcgccaaacgcatcacggcgggcaataaccgcctgcattgcctgttccgccaggcgcgggatttcaacgcaccagggctggcgtttttctgccggatgcagctccagccagtcggcaatattggcaattaagcgacgtccgcgatggtgtgccggatcaagtcgcccttcaatgtcatcaacaatccagtactcttctggttcacagcttgcctgccattgcaggagccgtttccccgtcaggctgcttcccagttgcaccacaatttgcgcctgctgcagctcgctggtcgctttggcattgcctaaccaaagatcggcacacggcagcggctgcccggtttgactcagcacatcgccaatcagcggccagccaagagtttgcgcccacagggcaacttttttgccctcttccgcactcatgcgcccggcaaccaccacgccgcgcttttgtcgccagaagaaccagtcgcgctgtttttcactttccagacgaggcgcttcacgcagccacggtttgtcttcctgccaccagtcacccagacgctgttgccagctaagcccggtatcgtccatttcgccatacagcggttcagcaaacgggcagttgatatggactccccccgcatgaagcgtaccgagagcgtggtcgatggtagaaaccagccaacgtgcggggatatcctgggtcgggcgcggcaaactaatactgtgcgtggggtgagaggcgaacattcccggctggcgaattgcctgattcgcgccgcagtcaattagctccggcgggcgatcggcggttaagagaatcagtttttctccggttaacccggcttcaatcagtgccggatagagatttgccaccgccgtgccggaggtcacaatcaccgccaccggctgcttgctgactttcgccagccccagcgccagatgccccaacccacgctcatcgaaatgggtgtggtgaatgaatgcggaattctccgccgccgctaacgttaacggtgtagaacggctgcctggggcgatacagatgtgtctgacgccgtgacgcgttaatgcttccagaatgaccgccgcccagcgtcggttaaatgcgcttacactcatgagtttgtccggtatcaatattgcggctaagtataaggagctacaaaaatagattattgatatgaatcggtaatgatgcgactcattattattccatttgtaataaagtacgcagccctgccgctttgttgtcgatttcctgccactcttgctcggggtcggaaccacggacaatgcccgcgccagcatataatcgcacgacattgccgctaatttttgcactgcgcagggaaacgcagaattcgctttgttgtaaactgagatagcccgcagaaccggcgtaccattctcgggtgaacggttcgtgacgggcgataaactgtcgcgccagatcgcgcggtaagccagcaactgctgccgttggctgcaactgatgtaaacagatcacatcatccgctttgttgagactagtccagatacagcggcgaagatgctgcactttacgcagacgcagtacctgcggcggtaaaacatccagcgtctgggtatcggcctgtaatcgttgacagatatcttccaccaccagcatgttctcgcgctggtttttatcatccgccatcagccactctcctaactgctgcgcctgcttatcatcaggattatttgctactgttcccgccagcgcttcagtacgcagcgctttgtcacgccgccgccataaccgttccggactagagccaagaaaagcattttcgccatcaaaggccatgtaaaaatggtagcaattcagattcagtcgacgactggcagccatcatcgccgccgcgttgaccggacttgcgaaatgcaggtcagttgcccgagcgagcaccactttgtcgagctcaccttcggcgatggttttcgttgccagttcgattaattgcgtccagcccgttttgtccggccagtgttgttctcgcgtggtggttaaatgtaacccaggcaagggcttgatactcaccagtgtggcgataaattcttttgcctgaatcgcatcgtgctgaagggagctttcgctgaatagcgtcagccgcagcgtggctttaccgccacagcgtcgccattccaggcggggtaaaagtaaattgccctggctcgggtcaaaagcattcagcccccaaatgcgtaagtcggcgtgttccgggtgctggcgaagaaaacgttgtgcctggtccaagctcgtaaaacgggtaatcgcgcccaggacgacagcttcttcatcaccattacgttgttgccagtagaattgcgggtatgtttgctgactggccagccagctcaaggcatcaaaagcgtctttgagagggaaaggaatatcgataacccgaatgccgggtgtcgccggaatctcttggctcaaatggcgcagtagattttccagcgccgtagtaagactttgcacgcggacctctccctgttaaaagcctcacattatacggggtactacaaaaaaaatgcagtaccccggtgtagggaggttttaacggcgtgccagcaacagtcctagtaccagcccaacggccgcgcccacaccaattccttgccagggtttttcgtggacgtagtcatcagcacgataaactgcctgcttcgcccgatagtaataactgtcactagcctggctaacccgttttttcacatcatccagcgctttttctgcacgcgctttcagctcaacatatttctgatcggcgggatcgccagaggagcggagcacctcttccagtgtttcactaagcagcgtcaggtcgtcatcgatacgtgtatcaccaaactgattagacattctcgttctccatttgcgtaaaacctgtcactaactatagacaagggttgttgattacgcctgaattacctcgcgtgccatcccaatgtgtgggataccatcttcttcatagacctccgtcacagggataaaaccgaaactctggtagaagttttgcagatgcgcctgcgccccgaggtaaacaggcttatcaggccagtgatgcgtacatgtttcgagtgttttactcatcagctgctgccccactttttcgccacgcaacgcttcactgacaatcacccgacctataacgaccggctcaagatcatcatcacttttcagaatcctcgcatacgccaccagttcatcatttttccaaccgagaatatggcgattatcccccgtcaaatcatcaccatcgatatcctgataagggcaattctgctcgacaacaaacaccgcgcaacgcagttgtaataaggcataaagctgggaaacgcttaattcagagtgatgcagatcttgccattcaatcataatgctctccttttagatgtatgccttatactagccggaatattttttgaaacgtgatgaactcatggaattaatttttttaggtactagtgccggtgtgccaacccgcacgcgcaatgtcacggcaatattgcttaacctgcaacatccgacccagagcggactttggttgtttgactgcggtgaaggcacccagcatcagctactgcataccgcctttaaccctggaaaactggacaagatttttatcagtcaccttcatggcgatcatctttttggtttacccggcttgctgtgcagtcgttctatgagtggcattatccaacccttaacgatttatggtccgcaaggtatccgtgaatttgtggaaaccgcgctgcggattagcggcagttggaccgattatccgctggaaattgtcgaaattggcgctggcgaaattctcgatgatggcctgcgcaaagtaaccgcttatccgctggaacacccactggaatgttatggctatcgtattgaagaacatgataaaccgggtgcattaaatgcccaggcattaaaagctgctggcgtgccgcctggcccactgtttcaggaattaaaagcgggcaaaacaatcacgctggaagatggaaggcagattaacggcgcagattacttagctgctccagtgccaggtaaagcgctcgctattttcggcgataccggcccctgcgatgccgcacttgacctggctaaaggtgtcgatgtcatggtgcacgaagcgacgctggatataaccatggaagccaaagccaatagtcgcggccatagctctacacgccaggctgcgacactagcccgtgaggctggagtcggcaagctaatcattacccacgtcagcagccgctatgatgacaaaggttgtcagcacctgttacgtgaatgcaggagtattttcccggcgactgaactggcgaatgatttcaccgtgtttaacgtttaactctgcttattattaaaaacagggcgaaacttgccctgttatcgcaacccgcgctacatatatccacccacacaggcatattgagcgatttttgatatttattcatctccttacgcactatattcagagcaataagttgcctcttttcatcttgattcagcacaacctttgcaactaaaaggagcccatgatggttacagttgtcagcaattattgtcaattatctcaaacgcaactcagtcagacatttgcagaaaaatttactgtgaccgaggaattactgcagtctttaaaaaaaacagcgttatccggagatgaagaaagcattgagttactgcataatattgcgttaggttatgataaatttgggaaagaagctgaagatattctttaccatattgttagaaccccaacaaatgagaccctaagcattatccgacttatcaaaaatgcttgtttaaaattatataatctggcacatatcgcaaccaactcccccctcaaaagtcatgatagtgatgatctcctgttcaaaaaactattctcccctagcaaattaatgacaattatcggtgatgaaattcctcttatatctgaaaaacagagccttagtaaggtgcttttaaatgatgagaataatgaactgagtgatggtacaaacttctgggataaaaatcgtcaattaaccacagatgaaatagcttgctatcttcagaagatcgccgctaatgcaaaaaatactcaagtcaattatcctactggtctctacgtcccctactccaccagaactcacctggaagacgctctcaatgaaaatattaagagcgatccaagttggccgaatgaagtccagttattccccataaatactggcggacactggatattagttagcctacagaaaatagtaaataaaaaaaataataaactacaaataaaatgcgtcatattcaacagtttgcgtgcactaggctatgataaagaaaatagtcttaagcgtgtcattaatagttttaattctgaactcatgggagaaatgagcaataataatataaaagttcatttaaatgaaccagagataatatttttacatgccgatcttcagcaatacttaagccaaagttgcggtgcatttgtgtgcatggcagcccaggaagtgattgaacaaagggaaagcaattctgacagcgccccctatacgttattaaaaaaccatgctgacagatttaaaaaatatagtgcagaagagcagtacgaaattgattttcaacatcgactggcaaacagaaattgttatttagataaatatggcgatgcaaatatcaatcattattatagaaacttagaaataaaacacagtcaacccaaaaatagagcatccggcaaaagagtgagttaacatcattgttaattaattcgaccagtcagcaaatatgctgactggtcgaacatagtttgctaaacagtcatcactgactgatgtcagtcacaccatccgccagttcaatcaggcgaataaattccgccctgtaaccctgtggatcttccccttttgcctgctgagcccactgtttgatctgctgccaggaggtattgttcaggtattcagaaccgcgtaacttttgcccatatgcagctactgctgcgcgaaaacgcatatcttcagagggcgcgtttattgttggccccagcgggaattcaactaactgactttcttttccctgcgggtatttccagcgaatttttaaccaggccagttctttcgttttgtcgcttttcgctaatttgttatccggggcatagcgtaacttatcaatacttgctttttgcccgttcagcgttaattcgaataacaacgttatatgtttgcctgcgcctatatcccctgcatcaacgttgtcgttattaaaatgttccacccgaagttggcgcttttcataaccaatctgacggtattccgttacccacgcggggttaaactcaatttgcgctttgacatcttttgctacggtaatcaacatctgccgcatttcactattcaatactttctgcgcttcagagagggtatcaatgtagctgtagttgccgttaccaacatcggcaattcgcaccatcattgcctcgttgtaattgctattccccacgccaaacgtgctcagagtaacaccagactcccgctgttttttgaccatactttcaatgctttttggatcgtcaatgccaacgttaaagtcaccgtcagtggctaataaaatgcgattgatgccgcccttaataaaccccttcgtcgcctgctgataagccagttccagcccggcaccgccattggtactgccttcggcatccaggctatcaattgcggcattaatttccgccttatgactcccggagatagaaggcaatgcaatacgggagtcgccagcgtaggtcacgatggcaatgttatcctgctcacgaagttctttgaccaataatttcaagctagactggataagtggcaaacgttcatcagaaatcatactaccagaagtgtcgataagaaagaccagattagaagctggtaactcttcacttttgcgatctttcgccaggatatcaactttcagcaatgttcgctgttcattccatggtgcaggtgccaattcgtagcgcatagcgaaaggtattggcttagaggccggaatagattgtttgtctttgatatcccaatcagacgggaaataattgactatctcctccacccgcacagcgtctggcggaggtaacagcccttgattgaggaaacgccttacattcgcataactgccagtgtcaacgtcaagactaaacgtcgccaacggattttgcgctacctgcttaaccggattatcatcgaactgctggtagcgagcggttcctggatttgcgatatgtgtagcttttgctttagccgctcttgcaaatgttggcgcttcctgcaatcgcccctgtaaagcctgtttgtcactatattgttgcacttcttgctgggccaaggctttcgcggcggcggcgctttgctcagcctcttttattgcagcttgctgcgcggcaagcacttgctgctctgtgggagtactgggttgttgttgctgactttccttattctcaggttgcggcccacatccactcaaaatcaaactactcataagcaacatgattatatttttatttcgcatataaaatccttttaaataaactcaggcaccagacataaaatatactctttgtataatcctgctaatcttaataaaatacaatatcgaaacccatagcaaataatgattcaacaacgcaacccattaataatttgcatatgaaaaaaataatctttgcttttattatattatttgtgtttttactccctatgattattttttaccaaccctgggtcaatgcattaccgagtacgccccgacacgcaagtcctgagcaattagaaaaaacagttcgttatcttacacaaactgtgcatccacgtagtgccgacaatattgataatctgaataggtccgcagaatatataaaagaggtctttgtcagtagcggtgccagagttaccagccaggacgtccccattacgggtggcccctacaaaaacattgttgctgattatggtcctgccgatggaccgctgattattattggtgcgcattatgactctgccagcagttatgaaaacgatcaattgacctatacgccgggcgcggatgataacgccagcggtgtggcaggattactcgaactggcacgtttgttacatcagcaagtaccgaaaacaggcgtgcagctggtcgcctatgcgagcgaagaaccgcccttctttcgtagcgatgaaatggggagcgcggtgcatgcagctagccttgagcgtccagtgaaattaatgatagcactggagatgattggctattacgactctgcgcctggaagccagaattacccttacccggcaatgtcctggctttatcccgatcggggagactttattgccgtggtcggcagaatacaggatatcaacgccgttcgtcaggtaaaagcggcattgttgagttctcaggatttatctgtttattctatgaataccccagggtttattcccggtattgatttctctgaccacctgaattattggcaacacgatattcccgccataatgattactgacaccgctttttatcgtaataaacaataccacttgcccggtgataccgcagacagattgaattatcagaaaatggctcaggtagtggatggtgttataactttgttatacaacagtaaataataaaaatttctcgaggcgggtccagaaaaagcgacatgcacattttattttccctcatctgttttaagatgcgaaacatgaaattcaacggaggaaaaataaatgggaatgattggctattttgcagaaattgacagtgaaaagattaaccaactgcttgagtctactgaaaaacctttgatggataatatacatgacacgcttagtggattacgccgactggatattgataaacgctgggattttttacactttgggctgacaggcacctctgcttttgatcccgcgaagaatgatccgctgagtcgtgccgtgcttggtgaacacagcctcgaagatggcatagatggcttccttggattgacctggaatcaggagttagccgcgacaatcgaccgactggaaagtctggatcgaaatgaactgcgtaaacagttttccattaagcgactcaatgaaatggagatttatccgggagtgacctttagtgaagagttagaggggcaactctttgccagcatcatgcttgatatggaaaagctgattagcgcgtatcgacgtatgctgcgacaagggaatcatgcgctgacggttattgttgggtgatatagcttgatgcctgggggagaaagacccattagttaagatttacgccaggatcatcttgaaaaaatctttaaccatggtccggtttttatccccttgtataaatattactaaatgcttgcttagtcgcattgttaaatgcaataccgtatattcggtatgtaacagcgatatcctctgtgctggcaacgatctgtcatgcttgatgaaaacggaattgaacctgtcattaccaggtagataaaaagcctgttcaattttgggattattttttataactcgtgtctgttatggcgacacgggaaaacatcaatattgtccttcacaaattgcagtaatatagaatcaacctctcttgcaagttggtcacaatgtattataagcattttgaatatgtcatcctctgtaatctcgtgaaaattttcggccttgtcttttagctcatcatatcggattcttgcagtaaccattttttgggcgagttctaataaccccaaagcttgcaattgctggtgagtatgatcactttcaaaaaatatcccacactccattccttcccaaccaacatattcatgccattcataaaccagcataaatgtttgtaaaactggcggtaataattggatatctgcaaaaccaaaccaaaacttacgcttgagatcccactcatattcaatcgccaatgctatattgtttaaggcatctccggcatccttatttttacgcaaaatcaattccgtcagtgtatagcgttgttcatcaatacgccgaagagcttctgcaatatcatagtttgtagccaacaaaacattctctgcttcctgatgagtgacgtctgcttttgccgtcaatatattgatttggtcaatatgaaacaacttgatggcttcatcaacatcaccgccagtcctctctaacaaacgtctggcaacctggataccgacaggtacgttcttccgaagtttacgaatttcacttaaccattccatgtcaaacccctttaaatatttatgatattaaatataacaacgtctggataacgacccggcctgactgaatatctcacgttttcctgcttaacattcatgttatgatgctcttgaaactaataatacgtatggaattgtcactatttatctgctaatgaatagtaacaatgtcattcgtttgatgaatatattatttcagggaataattatgacacctttagaacgcattacccaacttgttaatatcaatggtgatgttaataatcctgatactcctcgtccattgttatctcttgaggatttttttattgacaataatatccatggtagtatatgttgcaatgtgattccagaacaatctccgcaagctatctatcaccattttctgaaaatacgtgagcgtaacaatgttagtgatgttttggtagaaattacgatgttcgatgacccagactggccctttagtgaaagtattttagttatcaccactgctagtccagaagaagttcagagctggtttgtagaagaaattgcccctgatgagtgctgggaaggatggagtgaagatacggagcatggatgggttgaagtccctgtgggtatgcatccggttacttgttggtgggattaaaacatttatataaacagataagcggatgtttacataaatttttatgtgaaggaacatgatgaaacttattcctcgcagtagtgatattagtcctggcattgatggaatttgcccggggccttttcctccgaacggatttaccgtacttacagatgcagcatatggtaacggagactgtttcggtttgtactggcctattggtcaggagcataaactacctatagtgtgcgaaacgtaccatgacgaatggcgaatcgtacctgccttttccagcattaagaagttcgaagaatggctggaagtgaatgatgatgatccccatgaaaatggcatcagcatcgaagatcaagactttgcagcaaatctcttccgtgttgctcggaaatgtcttagtacgggaaggcttgatgacgcactgccactgttacagcgagcaacagaacaattgcctgaagtcagcgaatattggttagcactggcaatccagtatcgccgatgtaaaaaaacagaagctgcagcacaggctgcgcttaatgcttatcttggcaattgggcatttggtgttcctgacaataaagtcattcatttgctgagtcaggccgcagatgtcccgaatttccaggatgatcctgtgattcagtgcattaaagaacaaggattagatcttagctttggaggaacaaaggaaaataataattaccccttgatgcagatgtgtgttgatacttattttgcgcagagaaaaccgcttcaggcattaaccctgttacataattatgcctggataatgtccagtgaaacgactgcatttcaggaacgctatgattttaatatcgatgaatggcgggcaaaattcaggcagttatgtttagagtattttggcgatagtcgtacacagttcacttaacgctctgcgtctatctactatcccttctttttcagaaaaaccgccgagcatgtcggcggctttctgacttacaaagtaacagattacatcagcggcattgccaaacgcacaatgctaatcagcggttgtggccatacacccagcaccagtaccaacagtgcagagatcagcacaacgataccgcccgcgctgtactgccagttacttggtgcatcgcgacccggttgttccggggcgtgaagatacaggctcaccgccacgcgcaggtagtagtagaggccgattgcgctaccgacaaccacggcacccaccagccaccacaagtgtgcctggacaccgaccgccagcacgtagaacttaccgataaagcccagcgtcatcgggataccggccagagacagcatcatcaccgtcatcactgccgcgaggatcggacgatgccagaacagaccgcggtaagagaacagggaatcagcatccgggccacgatacgggctggacatcaggctgaccacgccgaacgcgccgaggctgctgaacagataaccggccaggtaaacccctaccgcttccatgctcatctcgccggtttgcagcgcaatcagcgctaccagcagatagccgaggtgagagatagaactgtaaccgagcagacgtttgatattggtctggctcagcgccatcaggttaccgaagatgatggaggcaaaggcgataatcgccagcaccacgcgaatcgcttcgctgtcacccaccggtgcgtagaggaacagacgcatcaccacaccgaagatagcgattttgctcgccgtcgccaggaaagtggaaaccggcgcaggcgcgccctggtatacgtctggcgtccacaggtggaacggcaccagagagagtttgaagccgaggccaacaatcatcaggccgaaacctgccagcaacagcggctcgttgagcataccgtcgccaaggtttttacccaacgcgacaaagctcaggtcgccagactgcgcatacaccagcgccataccaaacagcaggaaagaagacgctgcggcagaaaggatggtgtatttgatactggcttccagactacgtttctggcggaaagcgtaaccgaccaggccaaacagcggcaaagagatcagttcgataccgaggaacagagacgccagatggttggcattcgccagcaggatcccgcccagcgcggcaattaacaccaacaggtagaactcatccttgttgtcgttatagccttcaagccacgggtaggcgaaagtacaggtggcgaggctcgccaacaataccagcccggtgtaaagcatggcgaaaccatcaacgcgcatcagcggcgtaacgtccatagcgcccgcctggccaacaaaccagagcgaaaccagcgccgcgttaagcccaataaccgagagcgtagcgttgaggaaatgattgcgtcgccacgcaatggagagcatcacaaccaccaccgtcaagccgacgatcagcaacggtagcagtgcgatcaggttttgtggagttattgtcatggcgatttacggccttgtagtagtaacggaattaacaaaccactgctggatattgccaatcgcggagtggctggtatccagaatcggctgcggatagaagcccagcagtaccagcagcaccaccagcaacaggatcataaacagctcacgcaggctcatccctggcagttcctggctggcaatctggcttttcgctttaccgaagtaagcgcgatgtaacatcgccaggctataaacagatgcaaagaccagcccaaaggtagagataacggtaatcaccggtacaacctggaagctgccgaacagaatcataaattcgccgacgaagttaccggtgccaggcatcccaagcgttgccaccgcaaagaacaggctcagtgctggcagccatttcatcttgctccacagaccgcccatcatgcgcatgtcgcgggtatggatacgttcataaagctgaccacaaagaataaacagacccgccgcgctcaaaccgtgcgcaatcatctggattaccgcgccctggtaggccaactggctgccggtgtagatagcaatcagcacgaagcccatgtgggaaacgctggtgtaggcgatcagacgtttgatatcggtctgggcgaaggccatccacgcaccgtagaagatgccgataacacccagccacatagcaattggcgcgaactctgcgctcgcgttcgggaacagcggcagggagaaacgcagcaaaccgtaagcggcagttttcagcaagatccccgcgaggtcaacggaaccggcggtcggagcctgggagtgcgcatccggcagccagccatgcagcggaaccaccggcattttgactgcgaaggcgatgaagaagcccagcattaacaggtattccacaccactggacattggcgtattcagcagctcttcatagttgaaggtccagacgccggtcgcattgtagtgaacaaaaaccagcgccaggatggcaatcaacatcaccaggccactcgcctgggtgtaaatgaagaacttggttgccgccgtgatacgcgttttaccgtcagaggctttatgcccccacagtgcgatcaggaagtacatcggcaccagcatcatttcccagaagaagaagaacaggaacatgtcgatggcaaggaacacgccgataacgccgcccaggatccacatcaggttgaggtggaagaagccctgatatttttcgatctctttccagctacatagtaccgccagcacaccgagcagaccggtcagcacgaccatcagcaggctcagcccgtcaatggcgagatgaatagagataccaaaacgcgggatccacggcatgtcgaattcagactgccactgcggaattccggcggattgcgtcagactataaccgccctgcaaccacagttgcaggctcagcgccagcgtcaatcccatggtgatcagcgcgatccagcgtggcaccttgacgccaaagcgttcggtctgccagcacaggaagccgccaataaagggaattaatattagccagggtagtaacatggcgatctttattccttgtaaaagtcccgtcaggaccggattttcaacgaattctcacgacagaaaattctcttcggactgggggtagtgtcggatgcaccgcgaaggcggcttatccgacctacgttcttatatgcccaggggcaatcccacaatccttaactcaacgcagtaccatcaacagtgccagcaccacgaccgcaccgatgctcatggatgccacataccagcgcagatagccgttctcacttaacagcagacctttacctgcaaagcgggaaaggacagccgggatgttcatcatactgttcagcggatcgcgtttcagcaaccaggcaatacccaggaacggcttgacgaacactttgtcatacagccagtcaaatccccaggcgttgtaccaccaggtgcccagcagacggcccggcgcactgttggcgatggaggtcaccagagtacgtttacccagccacagccaggctgccagcagaatgccgaccaccgcgaccacgccagaggtaatttccagggtcaacatgctgccgtgcgccagttccgtcgtttgcggaagcacgccctgcagcggcggtacaatcagtgcgccaacgaaggtggaaaggatcagcagcacaatcagcggcaggctgtgagttacccctttcacggcgtgagcgtgaatttgttcttttccgtggaagacgatgaaaatcatacggaaggtgtagaggctggtcataaacgcaccgaccagacctgccaccatcagattgatatgaccattcgccatcgcacccgcgaggatctcatccttactgaagaagcccgcagtgaccagcggtagtgcgctcagtgctgcgccgcccaccaggaagcagagataaaccagcggaatagatttacgcagaccgcccatcttgaagatgttctgttcgtgatggcaggccagaatgacggaaccggatgccaggaacagcagcgctttaaagaacgcgtgggtcatcaagtggaaaatcgccgcatcccatgcctgcacgccaagcgcgaggaacatgtagccaatctggctcatggtagagtaagcgagaacacgtttgatgtcggtctgtaccagcgcggcaaaaccggccagcagcagcgtaaccgccccgacaatacccaccagatgcagaacttccggcgtcatcaggaacaggccgtgggtacgggcgatcaggtagacacccgcggttaccatggttgcggcgtggatcagcgcggagacaggcgtcgggcccgccatcgcgtcggcaagccatgtctgcaacggcaactgcgcagatttaccgaccgcaccgcccagcagcatcagcgtcgcccacatcagcatgttattgccgtcagcaaagtgcgctggtgccagttccaccatttcgcggaagttcagggtgcccagttcgttgtaaagaatgaacagtgcgaaagcgaggaacacgtcacccacacgggtcacgacgaacgctttcattgccgctgcgccattcttcggatcggtgtaatagaacccgatcagcagataggagcacaggcccacgccttcccagccgaggtacatcagcagcaggttgtcggcaagcaccagaaccaccatgctggcgatgaacaggttggtgtaagcgaagaagcgagagtagccctcttcaccgcgcatataccaggaggcgtacatgtgaataaggaaacccacaccagtgaccacgctgagcatggtcaggctcaggccgtccagcaccaggttaaaaccgatgttaaagtcgcctacgctcatccacgtccacagcggctggctgtatgtctgctcgccgttagcgaagaaatcaacgccgataaaggcggttaccagcgccgccaggcccacagagcctacgccgacgatcgcgctgacgttttcagaccagcgcccacgggagaatgccagcaggacgaagccaatcaatggcaaaataatggttaaggcaagcatgttcatccgcgcatctcacttacactatcgatgttcaggttctggcgacgacggtgaagttgcagcagcagcgcaaggccgatactcgcttctgccgccgcgaggctgatggcgagaatgtacatcacctgaccgtcggtctggccccagtagcttccggcgaccacgaaggccagcgcggaggcgttaatcatgatttccagaccaatcaacataaacagcagattgcgacggataaccagaccggttaagccaagaacgaataagattgccgcgaggatcagtccatgttgtaaggggatcatgcgtgctcctccgtttttcttttcgcgctgtcgtctttacgattgctcagcacttcacccgcacgctcttcacgaccgacgtggaaggccacaaccagacctgcgagcagtagcatagaagccagttccaccgccagtacgtaaggcccgaacagcgtaatacccactgctttagcactgattggcgtaccgtcgataccctgatcgttaacaccgaggatggcgtaaacaatcaccaccagcatgatggcgctcaaaattgccggaccaatccacacctgcggtttcagccactggcgttcctgttcgatttcactaccgcccaggttgagcatcatcaccacgaacacgaacagcaccataatggcacccgcgtagacgataatttccagcgcaccggcgaagtaagcgcccagactgaagaacaccccggaaatcgccagcaggctaataatcaggtacagcagtgcgtgtaccggattggtatgggtgatcactcgcaaggtcgcaagtatggctatcaggccacagatataaaaagcgaactccattgcccctctccttacggtaacaggctcttgacgtcgataggcttggcttcgttctctgcttcgcccttatctttgccgtcgattgccatacctgccatccggtagaagttatattccgggtatttgcccggaccggagatcagcagatcctctttctcgtaaaccagatcctggcgcttgtattcccccatttcgaaatccggggttaactgaatcgccgtggtcggacaggcttcttcgcacagaccacagaaaatgcagcgactgaagttgatgcggaaaaattccgggtaccagcgaccgtctttggtttctgctttttgcaggctgatacagccgaccgggcaggctaccgcgcagaggttacaggctacgcaacgctcttcgccgtccgggtcgcgggtcagaacgatacgaccacgataacggggcggcagatagaccggctcttccgggtacattcgcgtttcgcgtttggcgaacgcgtgcaggccgatcatccagatactacgaacctgggtgccgaaacctactaacaattcttttaaggtcatggtcttattgccccttattgcgcctgccagagaatgacagccgccgttaccagcaagttgatcagcgtcagcggcaggcagattttccagccgaaggacattacctggtcataacgcggacgcggtaagctcgcacgaatcaaaatgaacatcatcataaagaacgcggttttcagcgcgaaccagatgaatggcggtaacaacgggccttgccagccaccgaagaacagcgtcaccatcaatgcagagatggtcacaatcccgatgtactcacccacgaagaacagaccgaacttcataccggaatattcaatgtggtaaccatccgccagttcctgctcggcttccggctggtcaaacgggtgacggtgacataccgccacgcccgcgatggcaaaggtaataaaaccaaagaattgcgggataacgttccacacatgcgcctggctgttgacgatgtcggtcatgttgaaactaccggcctgcgccaccacgcccatcaaggaaagcccgaggaacacttcgtagctcagggtctgcgcagaagcacgcatcgcacccagcaagctgtatttgttgttactactccagcccgcaaacagcaccgcgtaaaccgccagacctgccatcatcaggaagaacaaaatcccgatgttcaggtcggcaaccacccaacccggactgactggcacaatcgcaaaggccagcagcaggctggtaaaggcaatcatcggtgccagggtaaagatgacgcgatcgctgaatttcgggatccagtcttctttaaagaacattttgatcatgtccgcaaccagctggaggctaccgccccagccaacacggttaggtccgtaacggttctggaacagacccagcaggcgacgttcgccaaagctcatgaatgccccgcaggtgacaaccaccagcaggatcaccaccgctttgaggatggtcagcaggatctcaatcagttccggacttatccaactcattgttgtgcctccttgagatcctcaagatgcgcgccagccagcaccggagcaatgccggacatacccatcggcaagcccacctgccctgccgtcagtccttcggcgatttcaaccggcagcgtgaccgtgttgccatcgtaactaaaggagacgcgtgtacctgcgttcacacccaacttcgcggcatccgctgggttgagtttgatgtacggctgcggcatacggctctggaagaccggagcacgctgactcaattcatcgctgccaaacaggtggtaatacggcgcgatacgccatttcccgtcctgcggctggaagcgtgccggtacgctggtgaagtaatccagaccattttcgctggtttcaaacagacgcacgcccggatcgccaaagcgcagtttgccgcccacttcgtcctggaatttgttccacgcctgcggggagttccagcccggcgcccaggcaaacggcacttggctacggtgcgcagtcggctggttgttaccttccatgctgaaggtgaacatggtgtcaatatcctgcggctgacgcggctcatgaacgctgatattggcgcgcatggcggtacgaccgctgtaacggtgcggttcacgggccagtttctgcccacgaatacggaatgtcgcatccggcgcagcatctttgatacctgccagttccgggattttcgccacaacagcgtcaatcacatggtcgagctgcgtccagtccacttcacggctcagcagggtgctgtgcaggctgtgtaaccagcgccagctttccagcatgacagttttgctgtcgtaataagcaggatcgtaaacctggaagaaacgttgggcgcggccttcgttgttgatcaccgtaccgtcgctttcagcaaagctggcagcagaaagtaccagatgggcgttttccataatcgctgtgcgttgatgatcaaccaccatcaccagcggtgctttagccagcgcagcattcacgcggatagcagaagcgtgacgatgcagatcgttttccaacaccaccaccgcgtcggcgcgtccggtttccagttcggttaacgcttcttcaaggctaccgccacccataatgcccagccccatgctgttgacggaacgggcaatcatggtgataccgacgtcagcgccgcgacctttcagggctttcgcgacgttagccgccgcctgaatcacctctaagctaccggcgttcgtcccggagataatcaacggtttcttcgcacctgccagtgcctgcacgatgacgtcgattttgctttgcagctcaggttcgataccgtcaaccgctggtgcagagttatccagcgcatgggcgatggcaaaacctaaacgcgcctgatcttcaaccggtgcgcggtaagtccacgccgcgatatcatccagacgggtgtcatcaacgttggtaacaaacagcggatgcttcgcacgttgaccgatgttgaggattgccgcaatctgccagtcagccactttctgtgctgccgccatttcgcgcgctttacctttcacagcctgacgcactgccagcgcgacgcgcgcgccggtctgggtaacgtcttcgcccagcaccagtaccgcatcgtaagattcgatttcgcgcagagccggagtataaatgccgccttcacgcagcactttcagcgccagttgcagacgttcctgctcaccgtgagcgataccggtgtagaagttttcttcgcccaccagttcacgcagcgcaaagttgctttccacgctggcacgcggagaaccaataccgatcactttcttgctctgacgcagaatatctgccgcgccctgcattgcctgttcggcgttgagggtaatgaaatcatcgccacgacgctgtactggctgacgcggacgatccttcaggttgacgtaaccgtaaccgaaacgaccacggtcgcagaggaagtagtggtttaccgtaccgttgtaacggttttcgatacgacgcagttcgccgtaacgttcaccggggctgatgttacagccgatggaacattgctggcagatgctcggcgcaaactgcatatcccatttacggttgtaacgctcggagtgcgttttgtcggtaaatacgccggtcgggcaaatttcgaccaggttaccggaaaattcgctttccagcgtgccgtcttccgggcgaccgaagtagacgttgtcgtgcgcaccgtaaacgcccagatctgtaccgtcagcgtaatctttgtagtaacgcacacagcggtagcaggcgatgcagcggttcatttcgtgagagatgaatggccccaaatcctgattacggtgggtacgtttggtgaaacggtagcgacggaagctgtgtccggtcatcacaatcatatcctgaagatggcagttaccgccctcttcacataccggacagtcgtgcgggtggttggtcatcaaccactcgaccacgctttcacggaactgtttcgcttcttcgtcgtcaatggaaataaaggtgccatcggaagccggtgtcatacaagacatcaccaggcgaccacgcgtgtcttccgcgttttggtattgcttcaccgcacactggcggcaagcaccgacacttcccagcgccggatgccagcaaaagtaaggaatatcaaggcccagagacagacaagcttccagcaggttgtccgctccgttgacctcgtattctttgccgtctacatgaattgtagccattagcatgcttccagttttctcagtcagagactgagcgttaatcgaaattcggttaccagcgctctttcagcaggttcggctgaatcccattaatcaaatgggtattgctgaacggctgtttgattcccgcctcaaattcttcgcggaaatatttgatggcgctctgtaacggctccactgcaccaggtgcgtgggcacagaaagttttacccgggcctaagaatcgacacagttgctcaagtgtttcgatatcgcccggctgaccttcaccacgctccagcgcacgcagaattttcacgctccacggcagaccgtcgcggcacggcgtacaccagccgcaggactcacgggcgaaaaactcttccaggttacgcaccaggctcaccatgttgatctcatggtcaaccgccatcgccagcgccgtacccagacggctgcccgctttaccgatactttcgaattccatcggcagatcaaggtgcgcttcggtcaggaagtcagtccccgcgccgcctggctgccaggctttaaatttcagaccatcacgcataccaccggcgtaatcttcgaggatctcgcgtgcggtggtgccgaacggcagttcccacagtcccggatttttcacccgaccggagaagcccatcagcttggtgccagcatctttacttttgctgatgttctgataccactccacgccgttagcgaggatcgccggaacgttacacagggtttcgacgttgttgacacaggtcggtttaccccatgcgccggaggttgccgggaagggtggcttgctgcgtgggttagcacgacgtccttccagggagttgattaacgctgtttcttccccgcagatgtagcgccctgccccggtatggacgaacagttcgaaatcgaaacctgttcccataatgtttttgccaagcagacccgcttcggtggcttcggcaatggcacggcgcagattaactgccgcttcgatatattcgccacgcaggaagatgtagccacggtaagctttcagcgcaaacgcggagatgagcataccttccaccagcaggtgcggcagttgctccatcaacaggcggtctttataggtgcccggctccatttcatcggcattacacagcaggtaacggatgttcatggattcgtctttcggcatcaggctccatttcaggccagtgctgaagcccgcgccgccgcgccctttcagaccagcgtcttttacctgattaacgatttcgtccggagacagcccggtcagcgccttacgcgcgccttcgtaaccgtttttgctgcggtattcgtccagccacactggctgtttgtcatcgcgcagacgccaggtcagcggatgcgtttcgggagtacggataatgtttttcatttataccgctccagcagttcagggatcgcttccggggtcagatgcgcgtgagtgtcctcatcgatcatcatgtttggccctttatcacagttccccaggcagcaagttggcagcagcgtaaagcggccatcaaatgtcgtttgccctggtttgatgttcagctttttctcgagcgccgcctgaataccctgataaccgttgatatgacagaccacgctgtcacaataacggatcacatggcgaccaaccggctggcggaagatctgactgtagaacgttgccacaccttcgacgtcgcttgccggaatacccagcacatcggcgatcgtgtggatcgcaccatccggcacccagccacgctgcttctgaacgattttcagcgcttcaatggacgccgcacgcgggtcttcgtagtggtgcatctcgtgctcgatcgcttcacgctctgccgcactcagctcaaaagcctcggtttgtggttgttgattctcgtgcataattagcggtccacatcactcataacaaaatcgatactgcccagataaacaatcaggtcagacaccaggctgccgcggatcgccgccggaatttgctgcaaatgcgcaaagctcggggtacgaacacgggtgcggtaactcatggtgctgccgtcgctggtcaggtagtaactgttgatccctttggtcgcctcaatcatctggaaagattcattggcaggcatcaccggaccccagctcacttgcaggaagtgggtgatcagggtttcgatatgttgcagcgtgcgctctttcggcggcggcgtggtcagcgggtgatccgctttgaacgggccttccggcatgttgttgaggcactgctcaagaatgcgcagactctggcgcagctcttccactttaagcattacgcgggtgtagcagtcagaaacgccaccacccaccgggatttcaaagtcgaagttttcatagccagaataaggacgcgccttacgcacgtcgaagtcgatcccggtagcacgcaggcccgcgccagtggtgccccactccagcgcctctttcgcgccataggcggcaacgccctgggaacgacctttcagaatggtgttttgcagcgccgctttctcgtaagacgccagacgtttcggcatccagtcgaggaactcacgcagcaggcgatcccagccgcgcggcaggtcgtgcgctacgccgccaatacggaaccacgccgggtgcatacggaaaccagtgattgcttccaccagatcgtaaattttctgacgatcggtaaaggcgaagaacactggcgtcattgcgccgacgtcctgaataaaggtgctgatatacagcaggtgactgttgatgcggaacagttcggagagcataacgcgaatgacgttaacgcgatccggcacggtgatcccggccagtttctctaccgccagcacgtaaggcatttcgttaacgcagccgccgaggtattcgatacggtcagtatacggaatgtagctgtgccaggactggcgttcgcccattttctccgcaccacggtggtggtaaccgatgtctggtacgcagtcgacaatctcttcgccatcgagttgcaaaacgatacggaaagccccgtgcgcgctcgggtggttcggaccgaggttgaggaacatgaagtcctcgttttcggtgccgcgcttcatcccccactcttccggtttgaaggtcagggcttccatctccagatcctgtttggctttggtcagctcaaacgggctgaattcggtagcgcgcgccggataatctttacgcagcgggtgacctttccaggtttgcggcatcatgatgcgtcgcaggttcgggtgaccgtcgaaagtaatgccaaacagatcccaggtttcacgctcataccagttagcgttcgggaacagtttggtgaaggtcggtacgtgcaggtcgttttctgccagcgccaccttcagcatgatgtcgcggttacgatcgatagaaatcagatggtagaaaacggaaaaatccgcggcaggtaacccttcgcggtgtgtgcgcagacgttcgtccatgccgtgtaagtcaaacagcatgacgtaaggtttcggcagtttctttaagaaatcgccaacttccagtaattgttcacgcttgatccacacaacgggaaccccggtgcgagtcgcctgaacagtaaaggcatccggcccaaaacggttgcgcagttcgccaatcaccggatcatcaagatgatcgcgggtctgccaggcgggttcttgcgcggttaagtcggtcatattgttcaccattgcaaatggtccgtggtgactgtcggcgcagtaagcttcgcgaaatagatttaggaataagcgaagaaaaatccctttgccgacaggcgcaaattaaatctcgtcaggtgtacgcaggttagttacggcaatgcgttcaccgcgcttgcgttcgcgctcactttgcatattggcgcgataaacgccctgatcgccaaccacccaggagagcggacgacgttctttgccgatagattcctgcaacagcatcagtgcctgcatgtacgcttcaggacgcggcgggcagcccgggatatacacatcaaccgggatgaatttatcgacgccctgcacaacggaataaatatcgtacataccaccagagttggcacaggcacccatactgataacccattttggttccagcatctggtcatacagacgctgaataaccggtgccattttggtaaagcaggttcctgcaaccaccatcaggtcagcctgacgcgggctagcacgcaatacttctgcgccaaaacgcgccacgtcatgcaccgcggtaaagctagtcaccatctcaacgtaacagcaggaaagaccgaagttatacggccaaatactgtttttacgaccccagttaaccatgtcattgagcttgcccataaacacgtttttgttaacttcttgctccagagggtcggttacgatctcctgcttttgcagggggtaacggtcgttctcaccgttgggatctatgcgggtgagcgtataatccatcttaatgcctcgcggttagcgttgacgattagcgatactgttcgtttccgggttcatacgctcgcggcgactacgcgcgggcgtccagtccagcgcgccaatacgcaccagataaaccagacctgccagtaacacaaaaataaaaattgcagcttccacaaagcctacccagccgctttcgcggatagaggtactccatgcgaacagatacagcgcttcaacgtcgaagataacgaagaacatggccaccagataaaacttggcggacaggcgtaagcgggcggagccgacgctgtcgataccggattcaaacggcacgtttttgctcctcgcgcgtgcgcgaccgcctaaaaaccaaccgcctaccagcatcaggcaacacaggccaatggcaacgataagaaagatagcgaatgcccagtgatgagcgatgacttcagtggatgtactcatactcattgcttactcatcaaaagtagcgccagattcactgctcttcacggcagatggacgccacatcgattcatggggaggaataaaaaaaaccttacaatcactgtagaaattcttttatacagctaattgatgtggttttttactcctttctataaccttttgtcaactttaacaaaagtttcttcacattagtttacataatatcaacaccattagcatttaatgccctttcaccccagatccttgacgactccaggataattagatgttgttgaatcgtgtccgttgtgaagcaatggaaaaaatacgggtctattttgacaggaatttgtgtcgattcctccccccaaaagagagtattttcttgatctgtgacacgcttttgtcattccataacaaaaacgcagcaacaaatttacgtattttttaacatcattgtagcaggtgatttttttcaggcgattatttgtgcgttcgggacgtgaatctctggtggttgaaaaatgaacagttttgtacgttctgcactatgcgatgaaggatttttactaaaaaaaagccgctggggtttaaaacacccccagcggctcgttttttacactattgtctcaggaattatctatcgtccgtcgattactcgatatccctttcaatcaacaaactatcatccccttccggagcagacattgggctgtattgccacggattatggtagctctccatcgcctgatagatcacctgggccagctcattattactggacggatcatagcacagcaaatattcggtatcaggtagcggcggtaagccatctactccactcagcacacgcaggtccgggctcatcatctcaaccggccttgccgtcacgccaagaccggctttcactgccgcacgaacggccggaagcgtgctggcgacataagccagtcgccatggaatatctgctttattaagcgtcgccagcaccatatcgcgaaacgggctaggatcatccagcaatacaagagggatcggctcgcctttttgcaatatgtattccgctgcgcagtaccagtgtgttgggctggtacgcaggttcaatgccttaaacgcactaggacgatgggtggttaccatcaaatccacttcctgggattccagcatttctgccatataggcattacgtttaacgcggacatccagcgctaatttcggataaacgctactcacgcgatttaacaggaaaggtaagatcgtatcggcagattcatcactagcaccgatagttaatacgccctgaagattactgaacattaaactactgcaggcctcatcattaaaacgcaggattttcctggcgtaaccaagaagttgaatgccatgttcagttaacagtttgttgcgaccgtgacgagcgaacagttctttcccaacgagttgttccagacgctgcatttgctgacttacggcggactgagtacgacacacagcggcagctgcggcagcaaaagtgttcagatcggcaacagcaacaaatgttctcagcagatcgaggtcgaggttaattatcggacgatttgcacttatcatatattatcacttactggcggctcatactgagctggttaatgctgtgcacacacaaacaagcaattccatttgtaatgtgcctccctggcagtttcatccggaacccggacgaaagtaaaaatgcatatgagttgcactaaaaaagcgactcacattgttccgttataatgcctgaagtagatcacagaatatatcttcagggatcgcatatctattaagttactcactcttttctatttatgacatgcgcgtgtttgtataaatgtaaatgtgagtccttgttccactctcgtgcagcatcgctggtcatacgcgaacacgtaccaacagcaatggtgaggcggcatcaagagcagggatccgtcatttatccgagcattttaccccaaaaaccttttatttataagggtcattgcgaattatctgatgcaaagttatgttatgttaggcaaagtaatcttctattattaataagcacatcaaaacctttttgaatattaaataataattaattagcatcatcctcattcattaattccgcttaacaatagtttcacaccttgcccccattgcgacacctcggaaatcatcacgcagttaaactctccgtaatgaggaaatatcatcatcgcgtttcattagtgaattcttaaatgaggcattttcacacaattatcttacagataaaaaaaccagacttacaattaagaatcagaacaattcactatataacattgcatgtaaagcatatacacctcattattttgtcattattaagttattaacagcacaatcgagccttcccctctggcaaaatcttattctgcagaccttcaaaacaccgtcctgggggagtacattgttctaagctgacttccacggcagggagtggcgataacagcaaaaaaggtcaagattcatgtcccccattgaaaaatccagcaaattagagaatgtctgttatgacatccgtggtccggtgctgaaagaagcaaaacgcctggaagaagaaggtaacaaggtactgaaactgaacatcggcaacccagccccgttcggttttgacgcgccagatgaaatcctcgttgacgtgatacgcaacctgcctaccgctcaagggtattgcgattccaaaggtctttactccgcgcgtaaagccatcatgcagcactaccaggctcgtggcatgcgtgatgttaccgtggaagatatttacatcggcaatggtgtaagcgagcttatcgttcaggcaatgcaggcattgctgaacagcggggacgaaatgttggttcctgcaccagattacccactctggaccgcggcggttagcctttccagcggtaaagcggtgcattatctttgcgatgaatcctctgactggttcccggacctcgatgatattcgcgctaaaattacgcctcgtacgcgtgggatcgttattatcaacccaaataacccaaccggcgcggtatattccaaagagcttttaatggagattgtggagattgcacgtcagcataatctcattatcttcgccgatgaaatttatgacaaaattctctacgacgacgctgagcatcacagtattgcgccgctggcacctgacctgctgaccattacctttaacggactgagcaaaacgtaccgcgttgcaggcttccgtcaggggtggatggtgttgaacgggccgaaaaaacacgccaaaggctacatcgaaggtctggaaatgctggctagtatgcgcctgtgtgctaacgttcctgcgcaacacgccattcagaccgcgctaggtggttatcagagcatcagtgaatttattacccctggcggtcgtctttatgagcagcgtaaccgcgcgtgggaactgatcaacgatattccgggcgtttcctgcgtgaaacctcgtggtgcgctgtatatgttcccgaaaatcgacgccaaacgctttaacattcacgacgatcagaaaatggtgttggatttcctgttgcaggaaaaagttctgttggtgcaagggacggcattcaactggccgtggccggatcacttccgcattgtcacgctaccgcgtgtcgatgatatcgagctgtctttgagcaagttcgcgcgtttcctttctggttatcatcagctgtaatcttaatttcactgccggagattgcatccggcagcgttatcccgccacaatgacctgatgatgtcatcatacgtaaggtcactatgaaacagagccatttttttgcccatctctcccgcctgaaactcattaaccgctggccgctcatgcgcaacgtgcggacggaaaatgtgtccgaacacagtttgcaggtagcgatggtcgcccatgcgctggcagctatcaaaaatcgaaaatttggcggtaatgtcaacgccgaacgtatcgctttactggcgatgtaccacgatgccagtgaagtgctcaccggcgatctccctactccggtgaaatacttcaatagccaaatcgctcaggagtacaaggctattgaaaaaatcgctcagcaaaaactggtcgatatggttccggaagagctgcgggatatctttgcgccgttaattgacgagcatgcatatagcgatgaagaaaaaagcctggtgaaacaggcagatgcactgtgtgcatatctgaaatgtctggaagaactcgcggccggaaataatgaattcttgctggcaaaaacgcgactggaagcgacgcttgaagcgcgtcgcagccaggagatggactacttcatggaaatatttgttcccagcttccatcttagcctcgatgagattagccaggatagtccgctgtaagcagccggagtctgcgtcgcatcaggcaataagcgccggatgcgacatcaggctcttgtcaaaacggaaacagcatcgggatcatcaccacacaaaccgccatcacgataatggtgaacggtacccccaacttcacaaagtcactgaagctgtaatttcccggacctaaaaccagtgtgttaacaggactagaaaccggtgtcataaaggcggcggatgctgccatcgccacgaccatcgcgaatggataagggctcacccccatcgttttggcagcagccagcgcaatcggagccatcaacaccgccgtcgcggtattagagataaatagcccaataaccgcgctcaagacaaacaaacaccccagcatcatatgtggcccgtaaccaccgccaatgtccatcagccctttcaccgccagcgcgacacctcccgttttctgtaatgccacagcaaacggcatcatcccaacgatcaaaataatgctcggccagtgaatggatttataggcgctttcagcatctatacagcggaatttccccatcagcaggcaggcgatgatagcggcaacaggattaggaatttcatctgtcagcattaacgccaccattagcaccagacagaaaatggcatggggtgcctggctgtgcgcgggacttgcttcactcacctcttccggtaagttcagcgctacgaagtcgcggccctgtttggccagcataccgatcagtttccagttacccacaaccaggatgatatcgcccagcagcagaggctcatccgccaggctaccttccagcgccacgccattgcgctttagccccaccacattcagtccgtagcgggtacgaaaaccaatttcgcgcacgcttttaccaatcagttcactctcaggaattaaactaatctctgccatgcccacatcaagggcctggtcagaaaatactcgccgcgcagtaccatcggctccagcaattgctcactacaaaattgccggagatcgacatcagccgcagacatatcaataagcaaaacgtcacgcgcgcgaaattcagaaaccccattaacgttcacgataacgcgacgaaaacgccgccagcgttcaacaccgatgacgttagcgccataacgctcacgtaatttgagatcatccagccgttgaccaatcattgggcttccggggcgaatagccagacgtcgcgcacgcccggtcagtcgatattcacggataagatcgcgaaaggttcgacgcgtccagccttcgcgctgcggggtctgggtatcccctttcagcatgaaacgcatcactaacatatacaaaatacccagcaccagcacgaccaggccaataggtgttacgctaaagaaactgaagccgtgatagccttcacgcagcaattcactgttgactaccaggttcggcggcgtcgccaccagcgtcatcatgccgctaatcagcccggcaaaacttaacggcatcatcagacgactcgggctcgtttgcatacgcatggcaacgcttaacaccacgggaataaagatagcgacaacgccggtactactcataaacgcgccaagccccgcgacggtcagcatcaacaaaaccaacattttgatttcactattgcccgcaactttgaccagccatgttcccattacggtggcaacaccggtacggaccaaaccatcgccaataataaacaaggcggcaatcaggacaacgttaggatcagaaaagccggaaaatacttctgggactgtcagcgttccgcttaatgcaaacgcgacaataacaaacaaagcgaccgcatccatacgcactctgcccgtcgcaaacaagacgatggcaacggccagtaaactaagaacccaaatcaattcaccgttcacaacttatccttgttaattgagggggatgacttgattctgccataaaaaagccccgacgagacggggctaaatcatgatcaggtgtttcactgaataataacatcgccatttggctgtttggtcacagtaatttgctccagactgtggaggaccaaatcgacctcattcaggcgcggggtatctgccggagcgttaaccgcaatgacatgacaacccgccgccaggccagaaagcacgccagcgggagcatcttccaccaccacacactcctgcggcgcaagccccagcagctgcgcgcctaacagatacgcatcaggttctggttttccgcgcttcactcgctcagcggttacaaacacctctggtgcgggaagcccagctattttatggcgcgctcgcgctaccggcatggagccagaagtcacaatggcccacggaatacctgctttattcaaatgactgagtaaggcgattgcccccggaagcgcggtaataccttcggtttccgtggcctcgatgtgctccagacgcgtaaactcggcggcaatatcagcctcggatttgcccgccataaaatggcgcagagaggtgatcgcctgtttaccgtgaatgaaagccagcacctcttccggcgctaacccatgacgtctggcccagttgctccacgcccgttctaccgcaggcagggaatccaccagcgttccatcaagatcaaacagaaaacctttgcaccgcacgcgggcctcctcaggcattgataatttgattaatttcgttggcgctcaaatggtactgacgcgggcaggcatgccacacattaagcatgcgctgatatttttcccacattggcgtctgggcgttaaaaccgtgagttccggcgtcaaaatgggtatagcgcccttccacattaaccataaagcggacataaccgaggtaacgtgcttcagtggcggcgtcaaagccgaggaaggtgacacgacgttcatcgatggattgctggtcctgcaaattagaccaggaaacatgcaacgcatgatacatctccataatgtcgatgatagtgcggcaggtttcttctttcagctcgccaaactcgcgatccaattcacgcatctgtaatccgtaaccacgctcaataattgtttgcaggcgacggtaacgttcagcatttgccggatcgagcatagtcatcatcttgtactgattagacaaaataagacgttgcgcgttggtcatttccattgttgactcctgtatcactctactacggtgaaaaaaaagaaggctgagtatgccttcttttatatgcgtaatcaggggtcaattacaaatcatcaaggaaagttttatccagttgtttgaaggcgcgcttaagcgtgtcagctaatgcctggtaatcaggcttgccttcaacgggtgccaacacctgtccagactcctgcaatttaccgcgaacttcataaaaccagttaaggattgcagggggtaatggcgtgacagaacgcttgcccagccaccacaatccctgcatgggtaaacttaaggcgaacagggcagtggcaactgccggcccaagctgaccgcccagggcaatctgccagcagagagtaaatacggcgatcggcggcataaaacggatcgcataacgcgtcatcttgataacgcgattttcgacaaagaccggggcaaggcgtttttccagcggccacgtcttactgtaatgctgtccccggcgaaacaagctaaaaaaattaacagaacgattatccggcgtactcatgcttcacctcaacttcacatataaagattcaaaaatttgtgcaaattcacaactcagcgggacaacgttcaaaacattttgtcttccatacccactatcaggtatcctttagcagcctgaaggcctaagtagtacatattcattgagtcgtcaaattcatatacattatgccattggctgaaaattacgcaaaatggcatagactcaagatatttcttccatcatgcaaaaaaaatttgcagtgcatgatgttaatcataaatgtcggtgtcatcatgcgctacgctctatggctccctgacgtttttttagccacgtatcaattataggtacttccatgagcagtaagttagtactggttctgaactgcggtagttctagtctgaaatttgccatcatcgatgcagtaaatggtgaagagtacctttctggtttagccgaatgtttccacctgcccgaagcacgtatcaaatggaaaatggacggcaataaacaggaagcggctttaggtgcaggcgccgctcacagcgaagcgctcaactttatcgttaatactattctggcacaaaaaccagaactgtctgcgcagctgactgctatcggtcaccgtatcgtacacggcggcgaaaagtataccagctccgtagtgatcgatgagtctgttattcagggtatcaaagatgcagcttcttttgcaccgctgcacaacccggctcacctgatcggtatcgaagaagctctgaaatctttcccacagctgaaagacaaaaacgttgctgtatttgacaccgcgttccaccagactatgccggaagagtcttacctctacgccctgccttacaacctgtacaaagagcacggcatccgtcgttacggcgcgcacggcaccagccacttctatgtaacccaggaagcggcaaaaatgctgaacaaaccggtagaagaactgaacatcatcacctgccacctgggcaacggtggttccgtttctgctatccgcaacggtaaatgcgttgacacctctatgggcctgaccccgctggaaggtctggtcatgggtacccgttctggtgatatcgatccggcgatcatcttccacctgcacgacaccctgggcatgagcgttgacgcaatcaacaaactgctgaccaaagagtctggcctgctgggtctgaccgaagtgaccagcgactgccgctatgttgaagacaactacgcgacgaaagaagacgcgaagcgcgcaatggacgtttactgccaccgcctggcgaaatacatcggtgcctacactgcgctgatggatggtcgtctggacgctgttgtattcactggtggtatcggtgaaaatgccgcaatggttcgtgaactgtctctgggcaaactgggcgtgctgggctttgaagttgatcatgaacgcaacctggctgcacgtttcggcaaatctggtttcatcaacaaagaaggtacccgtcctgcggtggttatcccaaccaacgaagaactggttatcgcgcaagacgcgagccgcctgactgcctgatttcacaccgccagctcagctggcggtgctgttttgtaacccgccaaatcggcggtaacgaaagaggataaaccgtgtcccgtattattatgctgatccctaccggaaccagcgtcggtctgaccagcgtcagccttggcgtgatccgtgcaatggaacgcaaaggcgttcgtctgagcgttttcaaacctatcgctcagccgcgtaccggtggcgatgcgcccgatcagactacgactatcgtgcgtgcgaactcttccaccacgacggccgctgaaccgctgaaaatgagctacgttgaaggtctgctttccagcaatcagaaagatgtgctgatggaagagatcgtcgcaaactaccacgctaacaccaaagacgctgaagtcgttctggttgaaggtctggtcccgacacgtaagcaccagtttgcccagtctctgaactacgaaatcgctaaaacgctgaatgcggaaatcgtcttcgttatgtctcagggcactgacaccccggaacagctgaaagagcgtatcgaactgacccgcaacagcttcggcggtgccaaaaacaccaacatcaccggcgttatcgttaacaaactgaacgcaccggttgatgaacagggtcgtactcgcccggatctgtccgagattttcgacgactcttccaaagctaaagtaaacaatgttgatccggcgaagctgcaagaatccagcccgctgccggttctcggcgctgtgccgtggagctttgacctgatcgcgactcgtgcgatcgatatggctcgccacctgaatgcgaccatcatcaacgaaggcgacatcaatactcgccgcgttaaatccgtcgctttctgcgcacgcagcattccgcacatgctggagcacttccgtgccggttctctgctggtgacttccgcagaccgtcctgacgtgctggtggccgcttgcctggcagccatgaacggcgtagaaatcggtgccctgctgctgactggcggttacgaaatggacgcgcgcatttctaaactgtgcgaacgtgctttcgctaccggcctgccggtatttatggtgaacaccaacacctggcagacctctctgagcctgcagagcttcaacctggaagttccggttgacgatcacgaacgtatcgagaaagttcaggaatacgttgctaactacatcaacgctgactggatcgaatctctgactgccacttctgagcgcagccgtcgtctgtctccgcctgcgttccgttatcagctgactgaacttgcgcgcaaagcgggcaaacgtatcgtactgccggaaggtgacgaaccgcgtaccgttaaagcagccgctatctgtgctgaacgtggtatcgcaacttgcgtactgctgggtaatccggcagagatcaaccgtgttgcagcgtctcagggtgtagaactgggtgcagggattgaaatcgttgatccagaagtggttcgcgaaagctatgttggtcgtctggtcgaactgcgtaagaacaaaggcatgaccgaaaccgttgcccgcgaacagctggaagacaacgtggtgctcggtacgctgatgctggaacaggatgaagttgatggtctggtttccggtgctgttcacactaccgcaaacaccatccgtccgccgctgcagctgatcaaaactgcaccgggcagctccctggtatcttccgtgttcttcatgctgctgccggaacaggtttacgtttacggtgactgtgcgatcaacccggatccgaccgctgaacagctggcagaaatcgcgattcagtccgctgattccgctgcggccttcggtatcgaaccgcgcgttgctatgctctcctactccaccggtacttctggtgcaggtagcgacgtagaaaaagttcgcgaagcaactcgtctggcgcaggaaaaacgtcctgacctgatgatcgacggtccgctgcagtacgacgctgcggtaatggctgacgttgcgaaatccaaagcgccgaactctccggttgcaggtcgcgctaccgtgttcatcttcccggatctgaacaccggtaacaccacctacaaagcggtacagcgttctgccgacctgatctccatcgggccgatgctgcagggtatgcgcaagccggttaacgacctgtcccgtggcgcactggttgacgatatcgtctacaccatcgcgctgactgcgattcagtctgcacagcagcagtaatctcgtcatcatccgcagctttgcgctgcggatatctgaaccggaaataatcactatttccggttttttattctcttaatttgcattaatcctttctgattatcttgcttaactgcgctgcatcaatgaattgcgccatcccactttgcatacttaccactttgttttgtgcaagggaatatttgcgctatgtccgcaatcactgaatccaaaccaacaagaagatgggcaatgcccgatacgttggtgattatcttttttgttgctattttaaccagccttgccacctgggtagttccggtggggatgtttgacagtcaggaagtgcagtatcaggttgatggtcaaacaaaaacacgcaaagtcgtagatccacacagttttcgcattctgactaacgaagcaggcgaacctgagtatcaccgcgtacagctgttcacgacgggcgatgaacgcccgggcctgatgaacttcccgtttgaaggattaaccagtggaagcaaatacgggacagccgttggcatcatcatgtttatgctggtgattggcggcgcgtttggcattgtgatgcgtacaggaaccattgataacggtatcctggcgcttattcgccatacccgcgggaatgaaattctctttattcctgcgctgtttattctgtttagtcttggcggcgcggtatttggtatgggagaagaggccgtcgcctttgccattatcatcgcaccgctaatggtccggctgggctatgacagtattaccaccgtcctggtgacctatattgccacgcaaatcggttttgccagtagctggatgaacccgttttgtgtggtcgttgctcaggggattgccggcgttccggtgctttctggctccgggttgcgtatcgtggtgtgggttatcgccactctgattggcctgatctttaccatggtgtacgccagtcgagtgaaaaagaatcctcttctgagtcgcgtgcatgagtccgaccgcttctttcgtgaaaagcaggctgatgttgaacaacgtccgtttacctttggtgactggctggtattgattgtcctgaccgccgtaatg
